(19) United States
(12) Patent Application Publication
(10) Pub. No.: US 2017/0275648 A1
(43) Pub. Date: Sep. 28, 2017

(54) NOVEL CAS9 PROTEINS AND GUIDING FEATURES FOR DNA TARGETING AND GENOME EDITING

(71) Applicant: North Carolina State University, Raleigh, NC (US)

(72) Inventors: Rodolphe Barrangou, Raleigh, NC (US); Alexandra E. Briner, Raleigh, NC (US)

(21) Appl. No.: 15/507,176

(22) PCT Filed: Aug. 27, 2015
(86) PCT No.: PCT/US15/47136

§ 371 Date: Feb. 27, 2017

Related U.S. Application Data
(60) Provisional application No. 62/043,204, filed on Aug. 28, 2014.
(60) Provisional application No. 62/043,882, filed on Aug. 29, 2014.

(51) Int. Cl. C12N 15/85; C12N 15/10; C12N 15/90; C12N 15/79; C12N 15/82; C12N 15/86; C12N 9/96; C12N 15/63

(52) U.S. Cl. CPC C12N 15/8509; C12N 9/96; C12N 15/102; C12N 15/63; C12N 15/79; C12N 15/8213; C12N 15/86; C12N 15/907; A01K 2217/052; C12N 2800/22

(57) ABSTRACT

The present invention is directed to methods and compositions comprising novel CRISPR polypeptides and polynucleotides for site-specific cleavage and nicking of nucleic acids, transcriptional control and genome editing.

### STATEMENT OF PRIORITY

[0001] This application claims the benefit, under 35 U.S.C. §119(e), of U.S. Provisional Application No. 62/043,882 filed Aug. 29, 2014 and U.S. Provisional Application No. 62/043,204 filed Aug. 28, 2014, the entire contents of each of which is incorporated by reference herein.

### STATEMENT REGARDING ELECTRONIC FILING OF A SEQUENCE LISTING

[0002] A Sequence Listing in ASCII text format, submitted under 37 C.F.R. §1.821, entitled 5051-869PR_ST25.txt, 1,668,540 bytes in size, generated on Aug. 25, 2015 and filed via EFS-Web, is provided in lieu of a paper copy. This Sequence Listing is hereby incorporated herein by reference into the specification for its disclosures.

### FIELD OF THE INVENTION

[0003] The invention relates to synthetic CRISPR-cas systems and methods of use thereof for site-specific cleavage and nicking, transcriptional control and genome editing.

### BACKGROUND OF THE INVENTION

[0004] Clustered Regularly Interspaced Short Palindromic Repeats (CRISPR), in combination with associated sequences (cas) constitute the CRISPR-Cas system, which confers adaptive immunity in many bacteria. CRISPR-mediated immunization occurs through the uptake of DNA from invasive genetic elements such as plasmids and phages, as novel “spacers.”

[0005] CRISPR-Cas systems consist of arrays of short DNA repeats interspaced by hypervariable sequences, flanked by cas genes, that provide adaptive immunity against invasive genetic elements such as phage and plasmids, through sequence-specific targeting and interference (Barrangou et al. 2007. Science. 315:1709-1712; Brouns et al. 2008. Science 321:960-4; Horvath and Barrangou. 2010. Science. 327:167-70; Marraffini and Sontheimer. 2008. Science. 322:1843-1845; Bhaya et al. 2011. Annu. Rev. Genet. 45:273-297; Terns and Terns. 2011. Curr. Opin. Microbiol. 14:321-327; Westra et al. 2012. Annu. Rev. Genet. 46:311-339; Barrangou R. 2013. RNA. 4:267-278). Typically, invasive DNA sequences are acquired as novel “spacers” (Barrangou et al. 2007. Science. 315:1709-1712), each paired with a CRISPR repeat and inserted as a novel repeat-spacer unit in the CRISPR locus. Subsequently, the repeat-spacer array is transcribed as a long pre-CRISPR RNA (pre-crRNA) (Brouns et al. 2008. Science 321:960-4), which is processed into small interfering CRISPR RNAs (crRNAs) that drive sequence-specific recognition. Specifically, crRNAs guide nucleases towards complementary targets for sequence-specific nucleic acid cleavage mediated by Cas endonucleases (Garneau et al. 2010. Nature. 468:67-71; Haurwitz et al. 2010. Science. 329:1355-1358; Sapranauskas et al. 2011. Nucleic Acid Res. 39:9275-9282; Jinek et al. 2012. Science. 337:816-821; Gasiunas et al. 2012. Proc. Natl. Acad. Sci. 109:E2579-E2586; Magadan et al. 2012. PLoS One. 7:e40913; Karvelis et al. 2013. RNA Biol. 10:841-851). These widespread systems occur in nearly half of bacteria (˜46%) and the large majority of archaea (˜90%). They are classified into three main CRISPR-Cas systems types (Makarova et al. 2011. Nature Rev. Microbiol. 9:467-477; Makarova et al. 2013. Nucleic Acid Res. 41:4360-4377) based on the cas gene content, organization and variation in the biochemical processes that drive crRNA biogenesis, and Cas protein complexes that mediate target recognition and cleavage. In types I and III, the specialized Cas endonucleases process the pre-crRNAs, which then assemble into a large multi-Cas protein complex capable of recognizing and cleaving nucleic acids complementary to the crRNA. A different process is involved in Type II CRISPR-Cas systems. Here, the pre-CRNAs are processed by a mechanism in which a trans-activating crRNA (tracrRNA) hybridizes to repeat regions of the crRNA. The hybridized crRNA-tracrRNA are cleaved by RNase III and following a second event that removes the 5′ end of each spacer, mature crRNAs are produced that remain associated with the both the tracrRNA and Cas9. The mature complex then locates a target dsDNA sequence (‘protospacer’ sequence) that is complementary to the spacer sequence in the complex and cuts both strands. Target recognition and cleavage by the complex in the type II system not only requires a sequence that is complementary between the spacer sequence on the crRNA-tracrRNA complex and the target ‘protospacer’ sequence but also requires a protospacer adjacent motif (PAM) sequence located at the 3′ end of the protospacer sequence. The exact PAM sequence that is required can vary between different type II systems.

[0006] The present disclosure provides methods and compositions for increasing the efficiency and specificity of synthetic type II CRISPR-Cas systems in such uses as, for example, site-specific cleavage, site-specific nicking, transcriptional control and genome editing.

### SUMMARY OF THE INVENTION

[0007] In some embodiments of the invention a protein-RNA complex is provide, the complex comprising the following components: (a) a Cas9 polypeptide comprising the amino acid sequence having at least about 80% identity to a polypeptide comprising an amino acid sequence of any of SEQ ID NOs:194-293, or a functional fragment thereof; (b) a crRNA comprising a 3′ region and a 5′ region, wherein the 3′ region comprises at least about 10 consecutive nucleotides of a Clustered Regularly Interspaced Short Palindromic Repeat (CRISPR) repeat comprising a nucleotide sequence of any one of the nucleotide sequences of SEQ ID NOs:1-98, or a functional fragment thereof, and the 5′ region comprises at least about 10 consecutive nucleotides of a spacer sequence located upstream of the repeat; and (c) a tracRNA comprising a 5′ and 3′ region wherein at least a portion of the 5′ region of the tracRNA is complementary to the 3′ region (CRISPR repeat) of the crRNA.

[0008] In other embodiments, the invention provides a chimeric RNA construct comprising: (a) a crRNA comprising a 3′ region and a 5′ region, wherein the 3′ region comprises at least about 10 consecutive nucleotides of a CRISPR repeat comprising a nucleotide sequence of any one of the nucleotide sequences of SEQ ID NOs:1-98, or a functional fragment thereof, and the 5′ region comprises at least about 10 consecutive nucleotides of a spacer sequence located immediately upstream of the repeat, and (b) a tracRNA comprising a 5′ and 3′ region, wherein at least a portion of the 5′ region of the tracRNA is complementary to the 3′ region (CRISPR repeat) of the crRNA and the 3′ region of said tracRNA forms secondary structures

[0009] In further embodiments, a method for site specific cleavage of a target DNA is provided, the method comprising: contacting a complex of the invention with the target DNA, thereby producing a site specific cleavage of the target DNA in a region defined by complementary binding of the spacer sequence of the crRNA to the target nucleic acid.

[0010] In still further embodiments, a method for site specific cleavage of a target DNA is provided, the method comprising: contacting a chimeric RNA of the invention with the target DNA in the presence of a Cas9 polypeptide, thereby producing a site specific cleavage of the target nucleic acid in a region defined by complementary binding of the spacer sequence of the crRNA to the target DNA.

[0011] In some embodiments, the invention provides a method of transcriptional control of a target DNA, comprising: contacting a complex of the invention with the target DNA, wherein the complex binds to the target DNA and the Cas9 polypeptide of the complex is deactivated, thereby controlling the transcription of the target DNA. In some embodiments, the invention provides a method of transcriptional control of a target DNA, comprising: contacting a chimeric RNA of the invention with the target DNA in the presence of an deactivated Cas9 polypeptide, wherein the chimeric RNA binds to the target DNA, thereby controlling the transcription of the target DNA. In some embodiments, the deactivated Cas9 polypeptide is fused with a transcriptional activator, thereby activating transcription of the target DNA.

[0012] In other embodiments, a method of DNA editing is provided, the method comprising: contacting a complex of the present invention with the target DNA, wherein the complex binds to the target DNA, thereby editing the target DNA.

[0013] In still other embodiments, a method of DNA editing is provided, the method comprising: contacting a chimeric RNA of the invention with the target DNA in the presence of a Cas9 polypeptide, wherein the chimeric RNA binds to the target DNA, thereby editing the target DNA.

[0014] In additional embodiments, a method for cleaving a double stranded polynucleotide is provided, comprising contacting a complex of the invention with said polynucleotide, wherein the polynucleotide comprises: (a) a protospacer sequence comprising a sequence that is least 80% complementary to the spacer sequence in the crRNA in said complex, and (b) a protospacer adjacent motif (PAM) comprising a nucleotide sequence of any one of the nucleotide sequences of 5′-NGG-3′, 5′-NGAAA-3′, 5′-NNG-3′, 5′-NGA-3′, 5′-NTAA-3′, 5′-NTG-3′, 5′-NNC-3′, 5′-NNAAC-3′, 5′-AGA-3′, 5′-NNNANNA-3′, 5′-NNANAA-3′, 5′-NNAAAA-3′, and/or 5′-AAAA-3′ downstream from the protospacer sequence.

[0015] In some embodiments, a method for site specific cleavage of a target DNA is provided, comprising: contacting a CRISPR RNA (crRNA) and a trans-encoded CRISPR RNA (tracrRNA) with the target DNA in the presence of a Cas9 polypeptide, wherein (a) the crRNA comprises at its 3′ region a repeat from Lactobacillus spp., Bifidobacterium spp., Kandleria spp., Leuconostoc spp., Oenococcus spp., Pediococcus spp., Streptococcus spp., Weissella spp., and/or Olsenella spp., and at its 5′ region a spacer sequence from the target DNA, (b) the tracrRNA comprises a sequence at its 5′ region that is complementary to the repeat of the crRNA, and (c) the spacer sequence hybridizes with a portion of the target DNA that is complementary to the spacer sequence and adjacent to a protospacer adjacent motif (PAM) comprising the nucleotide sequence of any one of the nucleotide sequences of 5′-NGG-3′, 5′-NGAAA-3′, 5′-NNG-3′, 5′-NGA-3′, 5′-NTAA-3′, 5′-NTG-3′, 5′-NNC-3′, 5′-NNAAC-3′, 5′-AGA-3′, 5′-NNNANNA-3′, 5′-NNANAA-3′, 5′-NNAAAA-3′, and/or 5′-AAAA-3′, thereby resulting in a site specific cleavage of the target DNA in the region defined by the complementary binding of the spacer sequence of the crRNA to the target DNA. In some embodiments, the crRNA comprises a nucleotide sequence of any one of the nucleotide sequences of SEQ ID NOs:1-98, or a functional fragment thereof, the tracrRNA comprises a nucleotide sequence of any one of the nucleotide sequences of SEQ ID NOs:99-193, or a functional fragment thereof, and the Cas9 polypeptide is from Lactobacillus spp., Bifidobacterium spp., Kandleria spp., Leuconostoc spp., Oenococcus spp., Pediococcus spp., Streptococcus spp., Weissella spp., and/or Olsenella spp. In some embodiments, the Cas9 polypeptide comprises an amino acid sequence having at least about 80% identity to a polypeptide comprising the amino acid sequence of any one of SEQ ID NOs:194-293, or a functional fragment thereof.

[0016] In further embodiments, a method for site-specific nicking of a (+) strand of a double stranded target DNA is provided, the method comprising contacting a protein-RNA complex with a double stranded target DNA, wherein the complex comprises (a) a crRNA comprising a 3′ region and a 5′ region, wherein the 3′ region comprises at least about 10 consecutive nucleotides of a CRISPR repeat from Lactobacillus spp., Bifidobacterium spp., Kandleria spp., Leuconostoc spp., Oenococcus spp., Pediococcus spp., Streptococcus spp., Weissella spp., and/or Olsenella spp., and the 5′ region comprises at least about 10 consecutive nucleotides of a spacer sequence located upstream of the repeat, (b) a tracRNA comprising a 5′ and 3′ region wherein at least a portion of the 5′ region of the tracRNA is complementary to the 3′ region (repeat) of the crRNA, and (c) a polypeptide comprising the amino acid sequence of any one of SEQ ID NOs:194-293, or a functional fragment thereof, and comprising a point mutation in a RuvC active site motif; and the target DNA comprises a protospacer sequence that is at least about 80% complementary to the spacer sequence in the crRNA and a protospacer adjacent motif (PAM) sequence of any one of the nucleotide sequences of 5′-NGG-3′, 5′-NGAAA-3′, 5′-NNG-3′, 5′-NGA-3′, 5′-NTAA-3′, 5′-NTG-3′, 5′-NNC-3′, 5′-NNAAC-3′, 5′-AGA-3′, 5′-NNNANNA-3′, 5′-NNANAA-3′, 5′-NNAAAA-3′, and/or 5′-AAAA-3′, downstream from the proto-spacer sequence, wherein the polypeptide cleaves the (+) strand of the double stranded DNA at a cleavage site located 5 nucleotides upstream of the PAM sequence, thereby producing a site-specific nick in said double stranded target DNA.

[0017] In additional embodiments, the invention provides a method for site-specific nicking of the (−) strand of a double stranded target DNA, comprising contacting a protein-RNA complex with a double stranded target DNA, wherein the complex comprises: (a) a crRNA comprising a 3′ region and a 5′ region, wherein the 3′ region comprises at least about 10 consecutive nucleotides of a CRISPR repeat from a Lactobacillus spp., Bifidobacterium spp., Kandleria spp., Leuconostoc spp., Oenococcus spp., Pediococcus spp., Streptococcus spp., Weissella spp., and/or Olsenella spp., and the 5′ region comprises at least about 10 consecutive nucleotides of a spacer sequence located upstream of the repeat, (b) a tracRNA comprising a 5′ and 3′ region wherein at least a portion of the 5′ region of the tracRNA is complementary to the 3′ region (repeat) of the crRNA, and (c) a polypeptide comprising the amino acid sequence of any one of SEQ ID NOs:194-293, or a functional fragment thereof, and comprising a point mutation in an HNH active site motif; and the target DNA comprises a protospacer sequence that is at least about 80% complementary to the spacer sequence in the crRNA and a protospacer adjacent motif (PAM) sequence comprising a nucleotide sequence of any one of the nucleotide sequences of 5′-NGG-3′, 5′-NGAAA-3′, 5′-NNG-3′, 5′-NGA-3′, 5′-NTAA-3′, 5′-NTG-3′, 5′-NNC-3′, 5′-NNAAC-3′, 5′-AGA-3′, 5′-NNNANNA-3′, 5′-NNANAA-3′, 5′-NNAAAA-3′, and/or 5′-AAAA-3′ downstream from the proto-spacer sequence, wherein the polypeptide cleaves the (−) strand of the double stranded DNA at a cleavage site located 5 nucleotides upstream of the PAM sequence resulting in site-specific nicking of the target DNA. In some embodiments, the CRISPR repeat comprises a nucleotide sequence of any one of the nucleotide sequences of SEQ ID NOs:1-98, or a functional fragment thereof, and/or the tracrRNA comprises a nucleotide sequence of any one of the nucleotide sequences of SEQ ID NOs:99-193, or a functional fragment thereof.

[0018] In further embodiments, a method for site-specific cleavage of a target DNA in an organism is provided, the method comprising: introducing a protein-RNA complex into said organism or at least one cell of said organism, wherein the protein-RNA complex comprises a crRNA comprising in its 3′ region a repeat from Lactobacillus spp., Bifidobacterium spp., Kandleria spp., Leuconostoc spp., Oenococcus spp., Pediococcus spp., Streptococcus spp., Weissella spp., and/or Olsenella spp., and in its 5′ region a spacer sequence having complementarity to a site in the target DNA in which a modification is desired; a polypeptide having at least about 80% identity with a Cas9 polypeptide of Lactobacillus spp., Bifidobacterium spp., Kandleria spp., Leuconostoc spp., Oenococcus spp., Pediococcus spp., Streptococcus spp., Weissella spp., or Olsenella spp., and a tracrRNA comprising a sequence at its 5′ region that is complementary sequence to the repeat of the crRNA, thereby producing a site-specific cleavage of the target DNA molecule in a region that is determined by the complementary spacer sequence of the crRNA to the target DNA molecule. In some embodiments, the polypeptide having at least about 80% identity with a Cas9polypeptide comprises a polypeptide comprising the amino acid sequences of any of SEQ ID NOs:194-293, or a functional fragment thereof, the crRNA comprises a nucleotide sequence of any one of the nucleotide sequences of SEQ ID NOs:1-98, or a functional fragment thereof, and/or the tracrRNA comprises a nucleotide sequence of any one of the nucleotide sequences of SEQ ID NOs:99-193, or a functional fragment thereof.

[0019] In additional embodiments, a method of typing a bacterial strain in a sample is provided, the method comprising amplifying a region of DNA comprising repetitive sequences that are at least about 80% identical to a repetitive sequence encoded by a nucleotide sequence of any one of the nucleotide sequences of SEQ ID NOs:1-98, or a functional fragment thereof, in said sample to produce amplified DNA; and typing the bacterial strain based on the amplified DNA.

[0020] In additional embodiments, the invention provides a method of detecting the presence of a Lactobacillus spp., Bifidobacterium spp., Kandleria spp., Leuconostoc spp., Oenococcus spp., Pediococcus spp., Streptococcus spp., Weissella spp., and/or Olsenella spp., in a sample, comprising: amplifying in said sample a region of DNA comprising repetitive sequences that are at least about 80% identical to the repetitive sequence encoded by a nucleotide sequence of any of the nucleotide sequences of SEQ ID NOs:1-98, or a functional fragment thereof, to produce amplified DNA, and detecting the amplified DNA.

[0021] In a further embodiment, the invention provides a method of identifying a strain of Lactobacillus spp., Bifidobacterium spp., Kandleria spp., Leuconostoc spp., Oenococcus spp., Pediococcus spp., Streptococcus spp., Weissella spp., and/or Olsenella spp., having resistance to an invasive foreign DNA, comprising: detecting a CRISPR spacer in said strain of Lactobacillus spp., Bifidobacterium spp., Kandleria spp., Leuconostoc spp., Oenococcus spp., Pediococcus spp., Streptococcus spp., Weissella spp., and/or Olsenella spp., wherein said CRISPR spacer is correlated with resistance to said invasive foreign DNA (e.g., phage DNA, plasmid DNA, chromosomal DNA, transposon) in Lactobacillus spp., Bifidobacterium spp., Kandleria spp., Leuconostoc spp., Oenococcus spp., Pediococcus spp., Streptococcus spp., Weissella spp., and/or Olsenella spp., thereby identifying said strain as comprising said CRISPR spacer and having resistance to said invasive foreign DNA. In some embodiments, the method comprises correlating the presence of a CRISPR spacer with resistance to said invasive foreign DNA (e.g., phage DNA, plasmid DNA, chromosomal DNA, transposon) in Lactobacillus spp., Bifidobacterium spp., Kandleria spp., Leuconostoc spp., Oenococcus spp., Pediococcus spp., Streptococcus spp., Weissella spp., and/or Olsenella spp. having a CRISPR system. In some embodiments, the method further comprises amplifying the DNA of said strain of Lactobacillus spp., Bifidobacterium spp., Kandleria spp., Leuconostoc spp., Oenococcus spp., Pediococcus spp., Streptococcus spp., Weissella spp., and/or Olsenella spp. using amplification primers for amplifying the CRISPR spacer correlated with resistance, thereby producing a CRISPR spacer amplicon when said CRISPR spacer is present, thereby detecting the presence or absence of said CRISPR spacer amplicon.

[0022] In still further embodiments, the invention provides a method for modifying (conferring or increasing) resistance of a bacterium or an archaeon to an invasive foreign DNA, comprising: introducing into said bacterium or archaeon a heterologous nucleic acid molecule comprising a first and a second CRISPR repeat from Lactobacillus spp., Bifidobacterium spp., Kandleria spp., Leuconostoc spp., Oenococcus spp., Pediococcus spp., Streptococcus spp., Weissella spp., and/or Olsenella spp. and a CRISPR spacer, wherein the spacer is homologous to at least a portion of the invasive foreign DNA and is located 3′ of the first CRISPR repeat and 5′ of the second CRISPR repeat to produce transformed bacterial or archeaon cells, and selecting transformed bacteria or archeaon cells having modified resistance to said invasive foreign DNA.

[0023] The invention further provides expression cassettes, vectors and cells comprising the nucleotide sequences of this invention.

[0024] These and other aspects of the invention are set forth in more detail in the description of the invention below.

### BRIEF DESCRIPTION OF THE DRAWINGS

[0025] FIG. 1 shows the modules of a single guide RNA (crRNA-tracRNA) as taught by the invention.

[0026] FIG. 2 shows Cas9 targeting the protospacer adjacent motif (PAM) sequence on the target DNA and the formation of the sgRNA-target DNA heteroduplex; the recognition (REC) lobe of Cas9 interacts with the sgRNA, while the nuclease (NUC) lobe drives the interaction with the PAM and target DNA.

[0027] FIG. 3 provides a further representation of the target DNA, sgRNA, Cas9 interaction.

[0028] FIG. 4 shows CRISPR repeats sequence alignment. For each cluster, CRISPR repeat sequence alignments are shown, with conserved and consensus nucleotides specified at the bottom of each family, with Sth3 (top), Sth1 (middle) and Lb (bottom) families.

[0029] FIG. 5 shows crRNA guided cleavage of target DNA with engineered and native Cas9 nucleases; (i) site-specific cleavage of the (+) strand of a target DNA (Cas9 without HNH activity), (ii) site-specific cleavage of the (−) strand of a target DNA (Cas9 without RuvC activity), (iii) site specific cleavage of both strands of the target DNA (Cas9 with both HNH and RuvC activity), and (iv) transcriptional control of a target DNA (deactivated Cas9).

[0030] FIGS. 6A-6C provide cartoons depicting genome editing (FIG. 6A), deactivated Cas9 (dCas9)-mediated repression of transcription (FIG. 6B) and use of dCas9 as a RNA-guided DNA binding protein with additional functions (FIG. 6C). NHEJ refers to non-homologous end joining and HDR refers to homology-directed repair.

[0031] FIG. 7 shows the predicted secondary structure of a single guide RNA (sgRNA) (crRNA-tracrRNA) from Streptococcus anginosus in which the crRNA and tracRNA portions of the sgRNA are noted.

[0032] FIG. 8 shows predicted secondary structure of the single guide RNAs (sgRNAs) (crRNA-tracrRNA) from ten different Streptococcus species/strains including that from Streptococcus thermophilus CRISPR1.

[0033] FIG. 9 shows predicted secondary structure of the single guide RNAs (sgRNAs) (crRNA-tracrRNA) from eleven different Streptococcus species/strains including that from Streptococcus thermophilus CRISPR3.

[0034] FIG. 10 shows predicted secondary structure of the single guide RNAs (sgRNAs) (crRNA-tracrRNA) from fifteen different Lactobacillus species/strains.

[0035] FIG. 11 shows predicted secondary structure of the single guide RNAs (sgRNAs) (crRNA-tracrRNA) from ten different Lactobacillus species/strains.

[0036] FIGS. 12A-12B shows the Cas9:sgRNA families. FIG. 12A shows a phylogenetic tree based on Cas9 protein sequences from various Streptococcus and Lactobacillus species. The sequences clustered into three families. FIG. 12B shows a consensus sequence and secondary structure of the predicted guide RNA for each family. Each consensus RNA is composed of the crRNA (left) base-paired with the tracrRNA. Fully conserved bases are in lighter text, variable bases are in black (2 possible bases) or represented by black dots (at least 3 possible bases), and base positions not always present are circled. Circles between positions indicate base pairing present in only some family members.

[0037] FIG. 13 shows congruence between tracrRNA (left), CRISPR repeat (middle) and Cas9 (right) sequence clustering. Consistent grouping is observed across the three sequence-based phylogenetic trees, into three families.

[0038] FIG. 14 shows congruence between Cas1 (left), tracrRNA (middle left), CRISPR repeat (middle right) and Cas9 (right) sequence clustering.

[0039] FIG. 15 shows Cas9 polypeptides from various bacteria and archeae species/strains in combination with protospacer adjacent motifs (PAM).

[0040] FIG. 16 shows trees to predict orthogonal groups. The three letter code for each organism is as follows: Lbu (Lactobacillus buchneri), PpaB (Pediococcus parvulus), Lga (Lactobacillus gasseri), Lje (Lactobacillus jensenii), Lpe (Lactobacillus pentosus), Lcas (Lactobacillus casei), Lrh (Lactobacillus rhamnosus), Oki (Oenococcus kitaharae), Lan (Lactobacillus animalis), Lcaca (Lactobacillus cacaonum), and Lma (Lactobacillus mali). Panel A is a Neighbor-joining tree from a MUSCLE alignment of the Cas9 protein sequences from 11 organisms of interest. The groups were used to determine which Cas9 proteins are more closely related and which are more distantly related to determine potential orthogonal systems. Panel B is a Neighbor joining tree from a Clustal alignment of the CRISPR repeat nucleotide sequences from 11 organisms of interest. The groups were used to determine which CRISPR repeats are more closely related and which are more distantly related to determine potential orthogonal systems. Panel C is a Neighbor-joining tree from a MUSCLE alignment of the Cas1 protein sequences from 11 organisms of interest. The groups were used to determine which Cas1 proteins are more closely related and which are more distantly related to determine potential orthogonal systems. Panel D is a Neighbor-joining tree from a Clustal alignment of the repeat-spacer array leader nucleotide sequences from 11 organisms of interest. The groups were used to determine which leader sequences are more closely related and which are more distantly related to determine potential orthogonal systems.

[0041] FIG. 17 shows the native tracrRNA:crRNA duplexes that have been combined into single guide RNAs for ease of visualization. The sequences were confirmed via RNA Seq and the structures were predicted using RNA folding software.

[0042] FIG. 18 shows the native tracrRNA:crRNA duplexes that have been combined into single guide RNAs for ease of visualization. The sequences were confirmed via RNA Seq and the structures were predicted using RNA folding software.

[0043] FIG. 19 shows the native tracrRNA:crRNA duplexes that have been combined into single guide RNAs for ease of visualization. The sequences were confirmed via RNA Seq and the structures were predicted using RNA folding software.

[0044] FIG. 20 shows the native tracrRNA:crRNA duplexes that have been combined into single guide RNAs for ease of visualization. The sequences were confirmed via RNA Seq and the structures were predicted using RNA folding software.

[0045] FIG. 21 shows the native tracrRNA:crRNA duplexes that have been combined into single guide RNAs for ease of visualization. The sequences were confirmed via RNA Seq and the structures were predicted using RNA folding software.

[0046] FIG. 22 shows the native tracrRNA:crRNA duplexes that have been combined into single guide RNAs for ease of visualization. The sequences were confirmed via RNA Seq and the structures were predicted using RNA folding software.

[0047] FIG. 23 shows the activity of the Type II CRISPR-Cas system in Lactobacillus gasseri (Lga) using a plasmid interference assay. The PAM region is underlined and again shown next to the bar chart. The italicized nucleotides in the alignment and those capitalized next to the bar chart are the nucleotides from the predicted PAM. Non-italicized underlined nucleotides and lowercase letters are mutations to the predicted PAM.

[0048] FIG. 24 shows the activity of the Type II CRISPR-Cas system in Lactobacillus rhamnosus (Lrh) using a plasmid interference assay. The PAM region is underlined and again shown next to the bar chart. The italicized nucleotides in the alignment and those capitalized next to the bar chart are the nucleotides from the predicted PAM. Non-italicized underlined nucleotides and lowercase letters are mutations to the predicted PAM.

[0049] FIG. 25 shows the activity of the Type II CRISPR-Cas system in Lactobacillus pentosus (Lpe) using a plasmid interference assay. The PAM region is shown next to the bar chart. The capitalized nucleotides are those from the predicted PAM. Lowercase letters are mutations to the predicted PAM.

[0050] FIG. 26 shows the activity of the Type II CRISPR-Cas system in Lactobacillus jensenii (Lje) using a plasmid interference assay. The PAM region is shown next to the bar chart. The capitalized nucleotides are those from the predicted PAM. Lowercase letters are mutations to the predicted PAM.

[0051] FIG. 27 shows the activity of the Type II CRISPR-Cas system in Lactobacillus casei (Lcas) using a plasmid interference assay. The PAM region is shown next to the bar chart. The capitalized nucleotides are those from the predicted PAM. Lowercase letters are mutations to the predicted PAM.

[0052] FIG. 28. Panel A is a Neighbor-joining tree from a MUSCLE alignment of the Cas1 proteins from 137 lactobacilli and closely-related organisms; the tree is rooted on the Type I/TypeII branch. The branches have been condensed for clarity. The Type I systems are filled with wavy lines, Type III in grey, Type II-C in black, and Type II-A in stripes. Panel B is a Neighbor joining tree from a MUSCLE alignment of Cas9 proteins in 68 organisms; the tree is rooted in the Type II-C branch. The three letter identifying code corresponds to Lbu (Lactobacillus buchneri), PpaB (Pediococcus parvulus), Lga (Lactobacillus gasseri), Lje (Lactobacillus jensenii), Lpe (Lactobacillus pentosus), Lcas (Lactobacillus casei), Lrh (Lactobacillus rhamnosus), Oki (Oenococcus kitaharae), Lan (Lactobacillus animalis), Lcaca (Lactobacillus cacaonum), Lma (Lactobacillus mali), Spy (Streptococcus pyogenes), Sth3 (Streptococcus thermophilus CRISPR 3), Sau (Staphylococcus aureus), Sth1 (Streptococcus thermophilus CRISPR 1), and Nme (Neisseria meningitidis). The Cas9 proteins grouped into 5 groups that were condensed by branches. The striped branches are Type II-A Cas9s that group by length and sequence. The black branch is the II-C Cas9s. Panel C is a linear representation of the Cas9 domains determined by Nishimasu et al. (Cell 156(5):935-49 (2014)) from the Spy Cas9. Inter Scan Pro and Pfam databases were used to predict protein motifs. A MUSCLE alignment was used to map the homologous domains onto all Cas9 sequences. An annotated demonstration of the Cas9 domains is shown at the bottom. There are three RuvC domains (labeled I through III and colored black), a single bridge helix domain (BH) colored white, two recognition domains (REC1 and REC2) colored light and dark grey, an HNH nicking domain in wide stripes, and the PAM interacting domain (PI) in narrow stripes. Panel D is a layout of five select CRISPR-Cas loci. The protein similarity, shown as a percentage between the loci, compares the two proteins directly above and below the number. Cas9 is black, the tracrRNA is dark grey, Cas1 is medium grey, Cas2 is white, Csn2 is light grey, the leader sequence is a white box with an L, CRISPR repeats are represented as black diamonds, and CRISPR spacers are light grey diamonds. The repeat-spacer arrays have been abbreviated; the number underneath the spacers depicts the order it was acquired in the array. The CRISPR repeat sequence is also shown at the right.

### DETAILED DESCRIPTION OF THE INVENTION

[0053] The present invention now will be described hereinafter with reference to the accompanying drawings and examples, in which embodiments of the invention are shown. This description is not intended to be a detailed catalog of all the different ways in which the invention may be implemented, or all the features that may be added to the instant invention. For example, features illustrated with respect to one embodiment may be incorporated into other embodiments, and features illustrated with respect to a particular embodiment may be deleted from that embodiment. Thus, the invention contemplates that in some embodiments of the invention, any feature or combination of features set forth herein can be excluded or omitted. In addition, numerous variations and additions to the various embodiments suggested herein will be apparent to those skilled in the art in light of the instant disclosure, which do not depart from the instant invention. Hence, the following descriptions are intended to illustrate some particular embodiments of the invention, and not to exhaustively specify all permutations, combinations and variations thereof.

[0054] Unless otherwise defined, all technical and scientific terms used herein have the same meaning as commonly understood by one of ordinary skill in the art to which this invention belongs. The terminology used in the description of the invention herein is for the purpose of describing particular embodiments only and is not intended to be limiting of the invention.

[0055] All publications, patent applications, patents and other references cited herein are incorporated by reference in their entireties for the teachings relevant to the sentence and/or paragraph in which the reference is presented.

[0056] Unless the context indicates otherwise, it is specifically intended that the various features and embodiments of the invention described herein can be used in any combination. Moreover, the present invention also contemplates that in some embodiments of the invention, any feature or combination of features set forth herein can be excluded or omitted. To illustrate, if the specification states that a composition comprises components A, B and C, it is specifically intended that any of A, B or C, or a combination thereof, can be omitted and disclaimed singularly or in any combination.

[0057] As used in the description of the invention and the appended claims, the singular forms “a,” “an” and “the” are intended to include the plural forms as well, unless the context clearly indicates otherwise.

[0058] Also as used herein, “and/or” refers to and encompasses any and all possible combinations of one or more of the associated listed items, as well as the lack of combinations when interpreted in the alternative (“or”).

[0059] The term “about,” as used herein when referring to a measurable value such as a dosage or time period and the like, is meant to encompass variations of ±20%, ±10%, ±5%, ±1%, ±0.5%, or even ±0.1% of the specified amount.

[0060] As used herein, phrases such as “between X and Y” and “between about X and Y” should be interpreted to include X and Y. As used herein, phrases such as “between about X and Y” mean “between about X and about Y” and phrases such as “from about X to Y” mean “from about X to about Y.”

[0061] The term “comprise,” “comprises” and “comprising” as used herein, specify the presence of the stated features, integers, steps, operations, elements, and/or components, but do not preclude the presence or addition of one or more other features, integers, steps, operations, elements, components, and/or groups thereof.

[0062] As used herein, the transitional phrase “consisting essentially of” means that the scope of a claim is to be interpreted to encompass the specified materials or steps recited in the claim and those that do not materially affect the basic and novel characteristic(s) of the claimed invention. Thus, the term “consisting essentially of” when used in a claim of this invention is not intended to be interpreted to be equivalent to “comprising.”

[0063] As used herein, the terms “increase,” “increasing,” “increased,” “enhance,” “enhanced,” “enhancing,” and “enhancement” (and grammatical variations thereof) describe an elevation of at least about 25%, 50%, 75%, 100%, 150%, 200%, 300%, 400%, 500% or more as compared to a control.

[0064] As used herein, the terms “reduce,” “reduced,” “reducing,” “reduction,” “diminish,” “suppress,” and “decrease” (and grammatical variations thereof), describe, for example, a decrease of at least about 5%, 10%, 15%, 20%, 25%, 35%, 50%, 75%, 80%, 85%, 90%, 95%, 97% or more, as compared to a control. In particular embodiments, the reduction results in no or essentially no (i.e., an insignificant amount, e.g., less than about 10% or even 5%) detectable activity or amount.

[0065] A “heterologous” or a “recombinant” nucleotide sequence is a nucleotide sequence not naturally associated with a host cell into which it is introduced, including non-naturally occurring multiple copies of a naturally occurring nucleotide sequence.

[0066] A “native” or “wild type” nucleic acid, nucleotide sequence, polypeptide or amino acid sequence refers to a naturally occurring or endogenous nucleic acid, nucleotide sequence, polypeptide or amino acid sequence. Thus, for example, a “wild type mRNA” is an mRNA that is naturally occurring in or endogenous to the organism. A “homologous” nucleic acid sequence is a nucleotide sequence naturally associated with a host cell into which it is introduced.

[0067] Also as used herein, the terms “nucleic acid,” “nucleic acid molecule,” “nucleotide sequence” and “polynucleotide” refer to RNA or DNA that is linear or branched, single or double stranded, or a hybrid thereof. The term also encompasses RNA/DNA hybrids. When dsRNA is produced synthetically, less common bases, such as inosine, 5-methylcytosine, 6-methyladenine, hypoxanthine and others can also be used for antisense, dsRNA, and ribozyme pairing. For example, polynucleotides that contain C-5 propyne analogues of uridine and cytidine have been shown to bind RNA with high affinity and to be potent antisense inhibitors of gene expression. Other modifications, such as modification to the phosphodiester backbone, or the 2′-hydroxy in the ribose sugar group of the RNA can also be made.

[0068] As used herein, the term “nucleotide sequence” refers to a heteropolymer of nucleotides or the sequence of these nucleotides from the 5′ to 3′ end of a nucleic acid molecule and includes DNA or RNA molecules, including cDNA, a DNA fragment or portion, genomic DNA, synthetic (e.g., chemically synthesized) DNA, plasmid DNA, mRNA, and anti-sense RNA, any of which can be single stranded or double stranded. The terms “nucleotide sequence” “nucleic acid,” “nucleic acid molecule,” “oligonucleotide” and “polynucleotide” are also used interchangeably herein to refer to a heteropolymer of nucleotides. Nucleic acid molecules and/or nucleotide sequences provided herein are presented herein in the 5′ to 3′ direction, from left to right and are represented using the standard code for representing the nucleotide characters as set forth in the U.S. sequence rules, 37 CFR §§1.821-1.825 and the World Intellectual Property Organization (WIPO) Standard ST.25. A “5′ region” as used herein can mean the region of a polynucleotide that is nearest the 5′ end. Thus, for example, an element in the 5′ region of a polynucleotide can be located anywhere from the first nucleotide located at the 5′ end of the polynucleotide to the nucleotide located halfway through the polynucleotide. A “3′ region” as used herein can mean the region of a polynucleotide that is nearest the 3′ end. Thus, for example, an element in the 3′ region of a polynucleotide can be located anywhere from the first nucleotide located at the 3′ end of the polynucleotide to the nucleotide located halfway through the polynucleotide.

[0069] As used herein, the term “gene” refers to a nucleic acid molecule capable of being used to produce mRNA, antisense RNA, miRNA, anti-microRNA antisense oligodeoxyribonucleotide (AMO) and the like. Genes may or may not be capable of being used to produce a functional protein or gene product. Genes can include both coding and non-coding regions (e.g., introns, regulatory elements, promoters, enhancers, termination sequences and/or 5′ and 3′ untranslated regions). A gene may be “isolated” by which is meant a nucleic acid that is substantially or essentially free from components normally found in association with the nucleic acid in its natural state. Such components include other cellular material, culture medium from recombinant production, and/or various chemicals used in chemically synthesizing the nucleic acid.

[0070] The terms, “invasive foreign genetic element,” “invasive foreign nucleic acid” or “invasive foreign DNA” mean DNA that is foreign to the bacteria or archaea (e.g., genetic elements from, for example, pathogens including, but not limited to, viruses, bacteriophages, and/or plasmids).

[0071] The terms “complementary” or “complementarity,” as used herein, refer to the natural binding of polynucleotides under permissive salt and temperature conditions by base-pairing. For example, the sequence “A-G-T” binds to the complementary sequence “T-C-A.” Complementarity between two single-stranded molecules may be “partial,” in which only some of the nucleotides bind, or it may be complete when total complementarity exists between the single stranded molecules. The degree of complementarity between nucleic acid strands has significant effects on the efficiency and strength of hybridization between nucleic acid strands.

[0072] “Complement” as used herein can mean 100% complementarity or identity with the comparator nucleotide sequence or it can mean less than 100% complementarity (e.g., about 70%, 71%, 72%, 73%, 74%, 75%, 76%, 77%, 78%, 79%, 80%, 81%, 82%, 83%, 84%, 85%, 86%, 87%, 88%, 89%, 90%, 91%, 92%, 93%, 94%, 95%, 96%, 97%, 98%, 99%, and the like, complementarity).

[0073] A “portion” or “fragment” of a nucleotide sequence of the invention will be understood to mean a nucleotide sequence of reduced length relative (e.g., reduced by 1, 2, 3, 4, 5, 6, 7, 8, 9, 10, 11, 12, 13, 14, 15, 16, 17, 18, 19, 20 or more nucleotides) to a reference nucleic acid or nucleotide sequence and comprising, consisting essentially of and/or consisting of a nucleotide sequence of contiguous nucleotides identical or almost identical (e.g., 70%, 71%, 72%, 73%, 74%, 75%, 76%, 77%, 78%, 79%, 80%, 81%, 82%, 83%, 84%, 85%, 86%, 87%, 88%, 89%, 90%, 91%, 92%, 93%, 94%, 95%, 96%, 97%, 98%, 99% identical) to the reference nucleic acid or nucleotide sequence. Such a nucleic acid fragment or portion according to the invention may be, where appropriate, included in a larger polynucleotide of which it is a constituent.

[0074] Different nucleic acids or proteins having homology are referred to herein as “homologues.” The term homologue includes homologous sequences from the same and other species and orthologous sequences from the same and other species. “Homology” refers to the level of similarity between two or more nucleic acid and/or amino acid sequences in terms of percent of positional identity (i.e., sequence similarity or identity). Homology also refers to the concept of similar functional properties among different nucleic acids or proteins. Thus, the compositions and methods of the invention further comprise homologues to the nucleotide sequences and polypeptide sequences of this invention. “Orthologous,” as used herein, refers to homologous nucleotide sequences and/or amino acid sequences in different species that arose from a common ancestral gene during speciation. A homologue of a nucleotide sequence of this invention has a substantial sequence identity (e.g., at least about 70%, 71%, 72%, 73%, 74%, 75%, 76%, 77%, 78%, 79%, 80%, 81%, 82%, 83%, 84%, 85%, 86%, 87%, 88%, 89%, 90%, 91%, 92%, 93%, 94%, 95%, 96%, 97%, 98%, 99%, and/or 100%) to said nucleotide sequence of the invention.

[0075] As used herein “sequence identity” refers to the extent to which two optimally aligned polynucleotide or peptide sequences are invariant throughout a window of alignment of components, e.g., nucleotides or amino acids. “Identity” can be readily calculated by known methods including, but not limited to, those described in: Computational Molecular Biology (Lesk, A. M., ed.) Oxford University Press, New York (1988); Biocomputing: Informatics and Genome Projects (Smith, D. W., ed.) Academic Press, New York (1993); Computer Analysis of Sequence Data, Part I (Griffin, A. M., and Griffin, H. G., eds.) Humana Press, New Jersey (1994); Sequence Analysis in Molecular Biology (von Heinje, G., ed.) Academic Press (1987); and Sequence Analysis Primer (Gribskov, M. and Devereux, J., eds.) Stockton Press, New York (1991).

[0076] As used herein, the term “percent sequence identity” or “percent identity” refers to the percentage of identical nucleotides in a linear polynucleotide sequence of a reference (“query”) polynucleotide molecule (or its complementary strand) as compared to a test (“subject”) polynucleotide molecule (or its complementary strand) when the two sequences are optimally aligned. In some embodiments, “percent identity” can refer to the percentage of identical amino acids in an amino acid sequence.

[0077] As used herein, the phrase “substantially identical,” or “substantial identity” in the context of two nucleic acid molecules, nucleotide sequences or protein sequences, refers to two or more sequences or subsequences that have at least about 70%, 71%, 72%, 73%, 74%, 75%, 76%, 77%, 78%, 79%, 80%, 81%, 82%, 83%, 84%, 85%, 86%, 87%, 88%, 89%, 90%, 91%, 92%, 93%, 94%, 95%, 96%, 97%, 98%, 99%, and/or 100% nucleotide or amino acid residue identity, when compared and aligned for maximum correspondence, as measured using one of the following sequence comparison algorithms or by visual inspection. In some embodiments of the invention, the substantial identity exists over a region of consecutive residues of an amino sequence of the invention that is at least about 50 residues to about 1400 residues in length, about 100 residues to about 1300 residues, about 150 residues to about 1250 residues, about 200 residues to about 1200 residues, about 250 residues to about 1150 residues, about 300 residues to about 1100 residues, about 350 residues to about 1050 residues, about 400 residues to about 1000 residues, about 450 residues to about 950 residues, about 500 residues to about 900 residues, about 550 residues to about 850 residues, about 50 residues to about 100 residues in length, about 100 residues to about 200 residues, about 200 residues to about 400 residues, about 300 residues to about 500 residues, about 400 residues to about 600 residues, and the like, and any value or range therein, up to the full length of the sequence. In some embodiments of the invention, the substantial identity exists over a region of consecutive nucleotides of a nucleotide sequence of the invention that is about 16 nucleotides to about 30 nucleotides, about 18 nucleotides to about 25 nucleotides, about 30 nucleotides to about 40 nucleotides, about 50 nucleotides to about 60 nucleotides, about 70 nucleotides to about 80 nucleotides, about 90 nucleotides to about 100 nucleotides, about 150 nucleotides to about 200 nucleotides, to about 250 nucleotide to about 400 nucleotides, about 500 nucleotides to about 750 nucleotides, about 700 nucleotides to about 1000 nucleotides, about 1250 nucleotides to about 2500 nucleotides, about 2000 nucleotides to about 4000 nucleotides, or more nucleotides in length, and any range therein, up to the full length of the sequence. In representative embodiments, the nucleotide sequences can be substantially identical over at least about 22 nucleotides. In some particular embodiments, the amino acid sequences are substantially identical over at least about 150 residues. In some embodiments, nucleotide sequences of the invention can be about 70% to about 100% identical over at least about 16 nucleotides to about 25 nucleotides. In some embodiments, nucleotide sequences of the invention can be about 75% to about 100% identical over at least about 16 nucleotides to about 25 nucleotides. In further embodiments, nucleotide sequences of the invention can be about 80% to about 100% identical over at least about 16 nucleotides to about 25 nucleotides. In some embodiments, sequences of the invention can be about 70% identical over at least about 18 nucleotides. In other embodiments, the sequences can be about 85% identical over about 22 nucleotides. In still other embodiments, the sequences can be 100% homologous over about 16 nucleotides. In a further embodiment, the sequences are substantially identical over the entire length of the coding regions. Furthermore, in representative embodiments, substantially identical nucleotide or protein sequences perform substantially the same function (e.g., repeats, Cas9 nuclease activity).

[0078] For sequence comparison, typically one sequence acts as a reference sequence to which test sequences are compared. When using a sequence comparison algorithm, test and reference sequences are entered into a computer, subsequence coordinates are designated if necessary, and sequence algorithm program parameters are designated. The sequence comparison algorithm then calculates the percent sequence identity for the test sequence(s) relative to the reference sequence, based on the designated program parameters.

[0079] Optimal alignment of sequences for aligning a comparison window are well known to those skilled in the art and may be conducted by tools such as the local homology algorithm of Smith and Waterman, the homology alignment algorithm of Needleman and Wunsch, the search for similarity method of Pearson and Lipman, and optionally by computerized implementations of these algorithms such as GAP, BESTFIT, FASTA, and TFASTA available as part of the GCG® Wisconsin Package® (Accelrys Inc., San Diego, Calif.). An “identity fraction” for aligned segments of a test sequence and a reference sequence is the number of identical components which are shared by the two aligned sequences divided by the total number of components in the reference sequence segment, i.e., the entire reference sequence or a smaller defined part of the reference sequence. Percent sequence identity is represented as the identity fraction multiplied by 100. The comparison of one or more polynucleotide sequences may be to a full-length polynucleotide sequence or a portion thereof, or to a longer polynucleotide sequence. For purposes of this invention “percent identity” may also be determined using BLASTX version 2.0 for translated nucleotide sequences and BLASTN version 2.0 for polynucleotide sequences.

[0080] Software for performing BLAST analyses is publicly available through the National Center for Biotechnology Information. This algorithm involves first identifying high scoring sequence pairs (HSPs) by identifying short words of length W in the query sequence, which either match or satisfy some positive-valued threshold score T when aligned with a word of the same length in a database sequence. T is referred to as the neighborhood word score threshold (Altschul et al., 1990). These initial neighborhood word hits act as seeds for initiating searches to find longer HSPs containing them. The word hits are then extended in both directions along each sequence for as far as the cumulative alignment score can be increased. Cumulative scores are calculated using, for nucleotide sequences, the parameters M (reward score for a pair of matching residues; always >0) and N (penalty score for mismatching residues; always <0). For amino acid sequences, a scoring matrix is used to calculate the cumulative score. Extension of the word hits in each direction are halted when the cumulative alignment score falls off by the quantity X from its maximum achieved value, the cumulative score goes to zero or below due to the accumulation of one or more negative-scoring residue alignments, or the end of either sequence is reached. The BLAST algorithm parameters W, T, and X determine the sensitivity and speed of the alignment. The BLASTN program (for nucleotide sequences) uses as defaults a wordlength (W) of 11, an expectation (E) of 10, a cutoff of 100, M=5, N=−4, and a comparison of both strands. For amino acid sequences, the BLASTP program uses as defaults a wordlength (W) of 3, an expectation (E) of 10, and the BLOSUM62 scoring matrix (see Henikoff & Henikoff, Proc. Natl. Acad. Sci. USA 89: 10915 (1989)).

[0081] In addition to calculating percent sequence identity, the BLAST algorithm also performs a statistical analysis of the similarity between two sequences (see, e.g., Karlin & Altschul, Proc. Nat'l. Acad. Sci. USA 90: 5873-5787 (1993)). One measure of similarity provided by the BLAST algorithm is the smallest sum probability (P(N)), which provides an indication of the probability by which a match between two nucleotide or amino acid sequences would occur by chance. For example, a test nucleic acid sequence is considered similar to a reference sequence if the smallest sum probability in a comparison of the test nucleotide sequence to the reference nucleotide sequence is less than about 0.1 to less than about 0.001. Thus, in some embodiments of the invention, the smallest sum probability in a comparison of the test nucleotide sequence to the reference nucleotide sequence is less than about 0.001.

[0082] Two nucleotide sequences can also be considered to be substantially complementary when the two sequences hybridize to each other under stringent conditions. In some representative embodiments, two nucleotide sequences considered to be substantially complementary hybridize to each other under highly stringent conditions.

[0083] “Stringent hybridization conditions” and “stringent hybridization wash conditions” in the context of nucleic acid hybridization experiments such as Southern and Northern hybridizations are sequence dependent, and are different under different environmental parameters. An extensive guide to the hybridization of nucleic acids is found in Tijssen Laboratory Techniques in Biochemistry and Molecular Biology-Hybridization with Nucleic Acid Probes part I chapter 2 “Overview of principles of hybridization and the strategy of nucleic acid probe assays” Elsevier, New York (1993). Generally, highly stringent hybridization and wash conditions are selected to be about 5° C. lower than the thermal melting point (Tₘ) for the specific sequence at a defined ionic strength and pH.

[0084] The Tₘ is the temperature (under defined ionic strength and pH) at which 50% of the target sequence hybridizes to a perfectly matched probe. Very stringent conditions are selected to be equal to the Tₘ for a particular probe. An example of stringent hybridization conditions for hybridization of complementary nucleotide sequences which have more than 100 complementary residues on a filter in a Southern or northern blot is 50% formamide with 1 mg of heparin at 42° C., with the hybridization being carried out overnight. An example of highly stringent wash conditions is 0.1 5M NaCl at 72° C. for about 15 minutes. An example of stringent wash conditions is a 0.2×SSC wash at 65° C. for 15 minutes (see, Sambrook, infra, for a description of SSC buffer). Often, a high stringency wash is preceded by a low stringency wash to remove background probe signal. An example of a medium stringency wash for a duplex of, e.g., more than 100 nucleotides, is 1×SSC at 45° C. for 15 minutes. An example of a low stringency wash for a duplex of, e.g., more than 100 nucleotides, is 4-6×SSC at 40° C. for 15 minutes. For short probes (e.g., about 10 to 50 nucleotides), stringent conditions typically involve salt concentrations of less than about 1.0 M Na ion, typically about 0.01 to 1.0 M Na ion concentration (or other salts) at pH 7.0 to 8.3, and the temperature is typically at least about 30° C. Stringent conditions can also be achieved with the addition of destabilizing agents such as formamide. In general, a signal to noise ratio of 2× (or higher) than that observed for an unrelated probe in the particular hybridization assay indicates detection of a specific hybridization. Nucleotide sequences that do not hybridize to each other under stringent conditions are still substantially identical if the proteins that they encode are substantially identical. This can occur, for example, when a copy of a nucleotide sequence is created using the maximum codon degeneracy permitted by the genetic code.

[0085] The following are examples of sets of hybridization/wash conditions that may be used to clone homologous nucleotide sequences that are substantially identical to reference nucleotide sequences of the invention. In one embodiment, a reference nucleotide sequence hybridizes to the “test” nucleotide sequence in 7% sodium dodecyl sulfate (SDS), 0.5 M NaPO₄, 1 mM EDTA at 50° C. with washing in 2×SSC, 0.1% SDS at 50° C. In another embodiment, the reference nucleotide sequence hybridizes to the “test” nucleotide sequence in 7% sodium dodecyl sulfate (SDS), 0.5 M NaPO₄, 1 mM EDTA at 50° C. with washing in 1×SSC, 0.1% SDS at 50° C. or in 7% sodium dodecyl sulfate (SDS), 0.5 M NaPO₄, 1 mM EDTA at 50° C. with washing in 0.5×SSC, 0.1% SDS at 50° C. In still further embodiments, the reference nucleotide sequence hybridizes to the “test” nucleotide sequence in 7% sodium dodecyl sulfate (SDS), 0.5 M NaPO₄, 1 mM EDTA at 50° C. with washing in 0.1×SSC, 0.1% SDS at 50° C., or in 7% sodium dodecyl sulfate (SDS), 0.5 M NaPO₄, 1 mM EDTA at 50° C. with washing in 0.1×SSC, 0.1% SDS at 65° C.

[0086] In particular embodiments, a further indication that two nucleotide sequences or two polypeptide sequences are substantially identical can be that the protein encoded by the first nucleic acid is immunologically cross reactive with the protein encoded by the second nucleic acid.

[0087] Any nucleotide sequence and/or recombinant nucleic acid molecule of this invention can be codon optimized for expression in any organism of interest. Codon optimization is well known in the art and involves modification of a nucleotide sequence for codon usage bias using species specific codon usage tables. The codon usage tables are generated based on a sequence analysis of the most highly expressed genes for the organism/species of interest. When the nucleotide sequences are to be expressed in the nucleus, the codon usage tables are generated based on a sequence analysis of highly expressed nuclear genes for the species of interest. The modifications of the nucleotide sequences are determined by comparing the species specific codon usage table with the codons present in the native polynucleotide sequences. As is understood in the art, codon optimization of a nucleotide sequence results in a nucleotide sequence having less than 100% identity (e.g., 70%, 71%, 72%, 73%, 74%, 75%, 76%, 77%, 78%, 79%, 80%, 81%, 82%, 83%, 84%, 85%, 86%, 87%, 88%, 89%, 90%, 91%, 92%, 93%, 94%, 95%, 96%, 97%, 98%, 99%, and the like) to the native nucleotide sequence but which still encodes a polypeptide having the same function as that encoded by the original, native nucleotide sequence. Thus, in representative embodiments of the invention, the nucleotide sequence and/or recombinant nucleic acid molecule of this invention can be codon optimized for expression in the particular plant species of interest. In some embodiments, the codon optimized nucleotide sequences of SEQ ID NOs:194-293, and/or a functional fragment thereof, have about 70% to about 99% identity to the nucleotide sequences of SEQ ID NO:194-293 and/or a functional fragment thereof.

[0088] In some embodiments, the recombinant nucleic acids molecules, nucleotide sequences and polypeptides of the invention are “isolated.” An “isolated” nucleic acid molecule, an “isolated” nucleotide sequence or an “isolated” polypeptide is a nucleic acid molecule, nucleotide sequence or polypeptide that, by the hand of man, exists apart from its native environment and is therefore not a product of nature. An isolated nucleic acid molecule, nucleotide sequence or polypeptide may exist in a purified form that is at least partially separated from at least some of the other components of the naturally occurring organism or virus, for example, the cell or viral structural components or other polypeptides or nucleic acids commonly found associated with the polynucleotide. In representative embodiments, the isolated nucleic acid molecule, the isolated nucleotide sequence and/or the isolated polypeptide is at least about 1%, 5%, 10%, 20%, 30%, 40%, 50%, 60%, 70%, 80%, 90%, 95%, or more pure.

[0089] In other embodiments, an isolated nucleic acid molecule, nucleotide sequence or polypeptide may exist in a non-native environment such as, for example, a recombinant host cell. Thus, for example, with respect to nucleotide sequences, the term “isolated” means that it is separated from the chromosome and/or cell in which it naturally occurs. A polynucleotide is also isolated if it is separated from the chromosome and/or cell in which it naturally occurs in and is then inserted into a genetic context, a chromosome and/or a cell in which it does not naturally occur (e.g., a different host cell, different regulatory sequences, and/or different position in the genome than as found in nature). Accordingly, the recombinant nucleic acid molecules, nucleotide sequences and their encoded polypeptides are “isolated” in that, by the hand of man, they exist apart from their native environment and therefore are not products of nature, however, in some embodiments, they can be introduced into and exist in a recombinant host cell.

[0090] In any of the embodiments described herein, the nucleotide sequences and/or recombinant nucleic acid molecules of the invention can be operatively associated with a variety of promoters and other regulatory elements for expression in an organism of interest and/or a cell of an organism of interest. Thus, in representative embodiments, a recombinant nucleic acid of this invention can further comprise one or more promoters operably linked to one or more nucleotide sequences.

[0091] By “operably linked” or “operably associated” as used herein, it is meant that the indicated elements are functionally related to each other, and are also generally physically related. Thus, the term “operably linked” or “operably associated” as used herein, refers to nucleotide sequences on a single nucleic acid molecule that are functionally associated. Thus, a first nucleotide sequence that is operably linked to a second nucleotide sequence, means a situation when the first nucleotide sequence is placed in a functional relationship with the second nucleotide sequence. For instance, a promoter is operably associated with a nucleotide sequence if the promoter effects the transcription or expression of said nucleotide sequence. Those skilled in the art will appreciate that the control sequences (e.g., promoter) need not be contiguous with the nucleotide sequence to which it is operably associated, as long as the control sequences function to direct the expression thereof. Thus, for example, intervening untranslated, yet transcribed, sequences can be present between a promoter and a nucleotide sequence, and the promoter can still be considered “operably linked” to the nucleotide sequence.

[0092] A “promoter” is a nucleotide sequence that controls or regulates the transcription of a nucleotide sequence (i.e., a coding sequence) that is operably associated with the promoter. The coding sequence may encode a polypeptide and/or a functional RNA. Typically, a “promoter” refers to a nucleotide sequence that contains a binding site for RNA polymerase II and directs the initiation of transcription. In general, promoters are found 5′, or upstream, relative to the start of the coding region of the corresponding coding sequence. The promoter region may comprise other elements that act as regulators of gene expression. These include a TATA box consensus sequence, and often a CAAT box consensus sequence (Breathnach and Chambon, (1981) Annu. Rev. Biochem. 50:349). In plants, the CAAT box may be substituted by the AGGA box (Messing et al., (1983) in Genetic Engineering of Plants, T. Kosuge, C. Meredith and A. Hollaender (eds.), Plenum Press, pp. 211-227).

[0093] Promoters can include, for example, constitutive, inducible, temporally regulated, developmentally regulated, chemically regulated, tissue-preferred and/or tissue-specific promoters for use in the preparation of recombinant nucleic acid molecules, i.e., “chimeric genes” or “chimeric polynucleotides.” These various types of promoters are known in the art.

[0094] The choice of promoter will vary depending on the temporal and spatial requirements for expression, and also depending on the host cell to be transformed. Promoters for many different organisms are well known in the art. Based on the extensive knowledge present in the art, the appropriate promoter can be selected for the particular host organism of interest. Thus, for example, much is known about promoters upstream of highly constitutively expressed genes in model organisms and such knowledge can be readily accessed and implemented in other systems as appropriate.

[0095] In some embodiments, a recombinant nucleic acid molecule of the invention can be an “expression cassette” or can be comprised within an expression cassette. As used herein, “expression cassette” means a recombinant nucleic acid molecule comprising a nucleotide sequence of interest (e.g., the nucleotide sequences of the invention), wherein said nucleotide sequence is operably associated with at least a control sequence (e.g., a promoter). Thus, some embodiments of the invention provide expression cassettes designed to express the nucleotides sequences of the invention.

[0096] An expression cassette comprising a nucleotide sequence of interest may be chimeric, meaning that at least one of its components is heterologous with respect to at least one of its other components. An expression cassette may also be one that is naturally occurring but has been obtained in a recombinant form useful for heterologous expression.

[0097] An expression cassette also can optionally include a transcriptional and/or translational termination region (i.e., termination region) that is functional in the selected host cell. A variety of transcriptional terminators are available for use in expression cassettes and are responsible for the termination of transcription beyond the heterologous nucleotide sequence of interest and correct mRNA polyadenylation. The termination region may be native to the transcriptional initiation region, may be native to the operably linked nucleotide sequence of interest, may be native to the host cell, or may be from another source (i.e., foreign or heterologous to the promoter, to the nucleotide sequence of interest, to the host, or any combination thereof).

[0098] An expression cassette of the invention also can include a nucleotide sequence for a selectable marker, which can be used to select a transformed host cell. As used herein, “selectable marker” means a nucleotide sequence that when expressed imparts a distinct phenotype to the host cell expressing the marker and thus allows such transformed cells to be distinguished from those that do not have the marker. Such a nucleotide sequence may encode either a selectable or screenable marker, depending on whether the marker confers a trait that can be selected for by chemical means, such as by using a selective agent (e.g., an antibiotic and the like), or on whether the marker is simply a trait that one can identify through observation or testing, such as by screening (e.g., fluorescence). Of course, many examples of suitable selectable markers are known in the art and can be used in the expression cassettes described herein.

[0099] In addition to expression cassettes, the nucleic acid molecules and nucleotide sequences described herein can be used in connection with vectors. The term “vector” refers to a composition for transferring, delivering or introducing a nucleic acid (or nucleic acids) into a cell. A vector comprises a nucleic acid molecule comprising the nucleotide sequence(s) to be transferred, delivered or introduced. Vectors for use in transformation of host organisms are well known in the art. Non-limiting examples of general classes of vectors include but are not limited to a viral vector, a plasmid vector, a phage vector, a phagemid vector, a cosmid vector, a fosmid vector, a bacteriophage, an artificial chromosome, or an Agrobacterium binary vector in double or single stranded linear or circular form which may or may not be self transmissible or mobilizable. A vector as defined herein can transform prokaryotic or eukaryotic host either by integration into the cellular genome or exist extrachromosomally (e.g. autonomous replicating plasmid with an origin of replication). Additionally included are shuttle vectors by which is meant a DNA vehicle capable, naturally or by design, of replication in two different host organisms, which may be selected from actinomycetes and related species, bacteria and eukaryotic (e.g. higher plant, mammalian, yeast or fungal cells). In some representative embodiments, the nucleic acid in the vector is under the control of, and operably linked to, an appropriate promoter or other regulatory elements for transcription in a host cell. The vector may be a bi-functional expression vector which functions in multiple hosts. In the case of genomic DNA, this may contain its own promoter or other regulatory elements and in the case of cDNA this may be under the control of an appropriate promoter or other regulatory elements for expression in the host cell. Accordingly, the nucleic acid molecules of this invention and/or expression cassettes can be comprised in vectors as described herein and as known in the art.

[0100] As used herein, “contact”, contacting”, “contacted,” and grammatical variations thereof, refers to placing the components of a desired reaction together under conditions suitable for carrying out the desired reaction (e.g., transcriptional control, genome editing, nicking, cleavage, and/or amplifying nucleic acids).

[0101] “Introducing,” “introduce,” “introduced” (and grammatical variations thereof) in the context of a polynucleotide of interest means presenting the nucleotide sequence of interest to the host organism or cell of said organism (e.g., host cell) in such a manner that the nucleotide sequence gains access to the interior of a cell. Where more than one nucleotide sequence is to be introduced these nucleotide sequences can be assembled as part of a single polynucleotide or nucleic acid construct, or as separate polynucleotide or nucleic acid constructs, and can be located on the same or different expression constructs or transformation vectors. Accordingly, these polynucleotides can be introduced into a host cell in a single transformation event, in separate transformation events, or, for example, they can be incorporated into an organism by conventional breeding protocols.

[0102] The term “transformation” as used herein refers to the introduction of a heterologous nucleic acid into a cell. Transformation of a cell may be stable or transient. Thus, in some embodiments, a host cell or host organism is stably transformed with a nucleic acid molecule of the invention. In other embodiments, a host cell or host organism is transiently transformed with a recombinant nucleic acid molecule of the invention.

[0103] “Transient transformation” in the context of a polynucleotide means that a polynucleotide is introduced into the cell and does not integrate into the genome of the cell.

[0104] By “stably introducing” or “stably introduced” in the context of a polynucleotide introduced into a cell is intended that the introduced polynucleotide is stably incorporated into the genome of the cell, and thus the cell is stably transformed with the polynucleotide.

[0105] “Stable transformation” or “stably transformed” as used herein means that a nucleic acid molecule is introduced into a cell and integrates into the genome of the cell. As such, the integrated nucleic acid molecule is capable of being inherited by the progeny thereof, more particularly, by the progeny of multiple successive generations. “Genome” as used herein also includes the nuclear and the plastid genome, and therefore includes integration of the nucleic acid into, for example, the chloroplast or mitochondrial genome. Stable transformation as used herein can also refer to a transgene that is maintained extrachromasomally, for example, as a minichromosome or a plasmid.

[0106] Transient transformation may be detected by, for example, an enzyme-linked immunosorbent assay (ELISA) or Western blot, which can detect the presence of a peptide or polypeptide encoded by one or more transgene introduced into an organism. Stable transformation of a cell can be detected by, for example, a Southern blot hybridization assay of genomic DNA of the cell with nucleic acid sequences which specifically hybridize with a nucleotide sequence of a transgene introduced into an organism (e.g., a plant). Stable transformation of a cell can be detected by, for example, a Northern blot hybridization assay of RNA of the cell with nucleic acid sequences which specifically hybridize with a nucleotide sequence of a transgene introduced into a host organism. Stable transformation of a cell can also be detected by, e.g., a polymerase chain reaction (PCR) or other amplification reactions as are well known in the art, employing specific primer sequences that hybridize with target sequence(s) of a transgene, resulting in amplification of the transgene sequence, which can be detected according to standard methods Transformation can also be detected by direct sequencing and/or hybridization protocols well known in the art.

[0107] Accordingly, in some embodiments, the nucleotide sequences, constructs, expression cassettes can be expressed transiently and/or they can be stably incorporated into the genome of the host organism.

[0108] A recombinant nucleic acid molecule/polynucleotide of the invention can be introduced into a cell by any method known to those of skill in the art. In some embodiments of the invention, transformation of a cell comprises nuclear transformation. In other embodiments, transformation of a cell comprises plastid transformation (e.g., chloroplast transformation). In still further embodiments, the recombinant nucleic acid molecule/polynucleotide of the invention can be introduced into a cell via conventional breeding techniques.

[0109] Procedures for transforming both eukaryotic and prokaryotic organisms are well known and routine in the art and are described throughout the literature (See, for example, Jiang et al. 2013. Nat. Biotechnol. 31:233-239; Ran et al. Nature Protocols 8:2281-2308 (2013))

[0110] A nucleotide sequence therefore can be introduced into a host organism or its cell in any number of ways that are well known in the art. The methods of the invention do not depend on a particular method for introducing one or more nucleotide sequences into the organism, only that they gain access to the interior of at least one cell of the organism. Where more than one nucleotide sequence is to be introduced, they can be assembled as part of a single nucleic acid construct, or as separate nucleic acid constructs, and can be located on the same or different nucleic acid constructs. Accordingly, the nucleotide sequences can be introduced into the cell of interest in a single transformation event, or in separate transformation events, or, alternatively, where relevant, a nucleotide sequence can be incorporated into a plant, for example, as part of a breeding protocol.

[0111] The present invention is directed to the use of CRISPR-Cas systems for site-specific cleavage or nicking of a target DNA, transcriptional control of a target DNA, DNA editing, cleaving a double stranded polynucleotide, for detection and typing of bacteria, and for introducing immunity to invasive foreign DNA (e.g., bacteriophage, plasmid, and the like) into bacteria.

[0112] In one aspect of the invention a protein-RNA complex is provided, comprising, consisting essentially of, or consisting of the following components: (a) a Cas9 polypeptide comprising, consisting essentially of, or consisting of an amino acid sequence having at least about 80% (e.g., 80%, 81%, 82%, 83%, 84%, 85%, 86%, 87%, 88%, 89%, 90%, 91%, 92%, 93%, 94%, 95%, 96%, 97%, 98%, 99%, and/or 100%) identity to an amino acid sequence of any of SEQ ID NOs:194-293 and/or a functional fragment thereof; (b) a Clustered Regularly Interspaced Short Palindromic Repeats (CRISPR) RNA (crRNA) comprising a 3′ region and a 5′ region, wherein the 3′ region comprises at least about 10 consecutive nucleotides (e.g., about 10, 11, 12, 13, 14, 15, 16, 17, 18, 19, 20, or more consecutive nucleotides) of a Clustered Regularly Interspaced Short Palindromic Repeats (CRISPR) repeat comprising a nucleotide sequence of any one of the nucleotide sequences of SEQ ID NOs:1-98, and/or a functional fragment thereof, and the 5′ region comprises at least about 10 consecutive nucleotides (e.g., about 10, 11, 12, 13, 14, 15, 16, 17, 18, 19, 20, or more consecutive nucleotides) of a spacer sequence located upstream of the repeat; and (c) a tracRNA comprising a 5′ and 3′ region wherein at least a portion of the 5′ region of the tracRNA is complementary to the 3′ region (CRISPR repeat) of the crRNA.

[0113] In a further aspect, the present invention provides a chimeric RNA construct comprising, consisting essentially of, or consisting of (a) a crRNA comprising a 3′ region and a 5′ region, wherein the 3′ region comprises at least about 10 consecutive nucleotides (e.g., about 10, 11, 12, 13, 14, 15, 16, 17, 18, 19, 20, or more consecutive nucleotides) of a CRISPR repeat comprising a nucleotide sequence of any one of the nucleotide sequences of SEQ ID NOs:1-98, and/or a functional fragment thereof, and the 5′ region comprises at least about 10 consecutive nucleotides (e.g., about 10, 11, 12, 13, 14, 15, 16, 17, 18, 19, 20, or more consecutive nucleotides) of a spacer sequence located immediately upstream of the repeat, and (b) a tracRNA comprising a 5′ and 3′ region, wherein at least a portion of the 5′ region of the tracRNA is complementary to the 3′ region (repeat) of the crRNA and the 3′ region of said tracRNA forms secondary structures (e.g., hairpin structures).

[0114] In some embodiments, the 5′ region of the tracrRNA of the protein-RNA complex and/or the chimeric RNA can comprise, consist essentially of, or consist of at least about 20 nucleotides (e.g., 20, 21, 22, 23, 24, 25, 26, 27, 28, 29, 30, 31, 32, 33, 34, 35, 36 or more consecutive nucleotides) complementary to the at least 20 consecutive nucleotides of the 3′ region of the crRNA. In some embodiments, the tracrRNA of the protein-RNA complex and/or the chimeric RNA comprises a nucleotide sequence of any one of the nucleotide sequences of SEQ ID NOs:99-193, and/or a functional fragment thereof.

[0115] As is well known in the art, Cas9 polypeptides are multifunctional proteins that bind DNA (e.g., target DNA), RNA (guide RNA) and specific nucleotide sequences called protospacer adjacent motifs (PAM), in addition to comprising nuclease/nickase activity (RuH and NHN motifs) that allows them to cut each strand of a double stranded nucleic acid. In some embodiments of the invention, a CRISPR Cas9 polypeptide can be a Cas9 polypeptide from Lactobacillus spp., Bifidobacterium spp., Kandleria spp., Leuconostoc spp., Oenococcus spp., Pediococcus spp., Streptococcus spp., Weissella spp., and/or Olsenella spp. As noted above, Cas9 polypeptides can recognize and bind to the PAM sequences that are located on the target DNA. Cas9 polypeptides exhibit specificity for the particular PAM sequence that they recognize and bind to. For example, FIG. 13 shows the relatedness of Cas9 polypeptide sequences from various bacteria and archeae species/strains and the protospacer adjacent motifs (PAMs) that are recognized by the Cas9 polypeptides as described herein.

[0116] In representative embodiments, a Cas9 polypeptide can be encoded by a nucleotide sequence of any of SEQ ID NOs:294-388, and/or a functional fragment thereof, or a polypeptide comprising the amino acid sequence of SEQ ID NOs:194-293, and/or a functional fragment thereof, or encoded by a nucleotide sequence encoding a polypeptide comprising the amino acid sequence of SEQ ID NOs:194-293, and/or a functional fragment thereof. In some embodiments, a Cas9 polypeptide can comprise a HNH and/or a RuvC motif comprising HNH and/or RuvC nickase activities, respectively. In other embodiments, a Cas9 polypeptide can be a deactivated (e.g., mutated, dCAs9) Cas9 polypeptide, wherein the deactivated Cas9 does not comprise HNH and/or RuvC nickase activities. The HNH and RuvC motifs have been characterized in S. thermophilus (see, e.g., Sapranauskas et al. Nucleic Acids Res. 39:9275-9282 (2011)) and one of skill would be able to identify and mutate these motifs in Cas9 polypeptides from other organisms. Notably, a Cas9 polypeptide in which the HNH motif and/or RuvC motif is/are specifically mutated so that the nickase activity is reduced, deactivated, and/or absent, can retain one or more of the other known Cas9 functions including DNA, RNA and PAM recognition and binding activities and thus remain functional with regard to these activities, while non-functional with regard to one or both nickase activities.

[0117] The structure of Cas9 polypeptides is described in the art and understood to comprise a nuclease lobe (NUC) and a recognition lobe (REC), with the NUC lobe interacting with the PAM and target DNA, while the REC lobe interacts with and binds to the sgRNA (crRNA-tracRNA) (see, Barrangou, R. Science 344:707-708 (2104), generally and figure presented therein. It is between the groove located between the two lobes that the sgRNA-target DNA heteroduplex is formed. Id. Further, as noted above, the HNH and RuvC motifs of a Cas9 polypeptide have been characterized (Sapranauskas et al. Nucleic Acids Res. 39:9275-9282 (2011)). Additional details regarding the structure of Cas9 polypeptides and their interaction with tracRNA and crRNA (sgRNAs) can be found in Nishimasu et al. (Cell 156(5):935-949 (2014)). Here, they provide the crystal structure of Cas9 in complex with guide RNA and target RNA as well as schematics of the sgRNA:target DNA complex and the structure of the Cas9 polypeptide. Thus, the structure of the Cas9 polypeptide is well characterized with the various functions of the protein associated with defined structures within the polypeptide.

[0118] Accordingly, a further embodiment of the invention provides a functional fragment of a Cas9 polypeptide comprising one or more of the functions of the functions of a Cas9 polypeptide including but not limited to HNH activity, RuvC activity, DNA recognition and/or binding, RNA recognition and/or binding, and/or PAM recognition and/or binding.

[0119] Accordingly, in further embodiments, the CRISPR Cas9 polypeptide can be a functional fragment of a CRISPR Cas9 polypeptide. Accordingly, in some embodiments, a functional fragment of a CRISPR Cas9 polypeptide can be a functional fragment of a Cas9 polypeptide from Lactobacillus spp., Bifidobacterium spp., Kandleria spp., Leuconostoc spp., Oenococcus spp., Pediococcus spp., Streptococcus spp., Weissella spp., and/or Olsenella spp. In other embodiments, a functional fragment of a CRISPR Cas9 polypeptide can be a functional fragment from an amino acid sequence of any of SEQ ID NOs:194-293. In some embodiments, the functional fragment of a Cas9 polypeptide can comprise HNH and/or RuvC nickase activities, respectively. In other embodiments, the functional fragment of a Cas9 polypeptide can be deactivated (mutated) in that it does not comprise HNH and/or RuvC nickase activity. Notably, a Cas9 functional fragment comprising a mutation in either or both the HNH motif and RuvC motif so that one or both nickase activities are reduced, deactivated, and/or absent, can retain their DNA, RNA and/or PAM recognition and binding activities, as described above, and therefore, such Cas9 fragments remain functional fragments with regard to at least one of these recognition and binding activities.

[0120] In some embodiments, a crRNA of this invention, comprising a 3′ region and a 5′ region, can further comprise a CRISPR repeat located upstream of the spacer sequence, wherein the CRISPR repeat comprises, consists essentially, or consists of at least about 10 consecutive nucleotides of CRISPR repeat from Lactobacillus spp., Bifidobacterium spp., Kandleria spp., Leuconostoc spp., Oenococcus spp., Pediococcus spp., Streptococcus spp., Weissella spp., and/or Olsenella spp. (e.g., SEQ ID NOs:1-98, or a functional fragment thereof). Therefore, in representative embodiments, a crRNA can comprise, consist essentially of, or consist of (from 5′ to 3′) a spacer sequence—a CRISPR repeat, or a CRISPR repeat—a spacer sequence—a CRISPR repeat. As used herein, a “functional fragment” of a crRNA means a portion of said crRNA which binds to the corresponding tracRNA and/or a portion of which is recognized and bound to a corresponding Cas9 polypeptide. FIG. 4 shows exemplary CRISPR repeat sequence alignments with conserved and consensus nucleotides specified at the bottom of each family, with Sth3 (top), Sth1 (middle) and Lb (bottom) families, thereby providing structural references for crRNA fragments for use with this invention.

[0121] A “spacer sequence” as used herein means a sequence that is upstream (5′) of a repeat in a crRNA. Alternatively, when the crRNA comprises two repeats (i.e., a first and a second repeat) the spacer sequence is located between the two repeats (i.e., the spacer sequence is located 3′ of the first repeat and 5′ of the second repeat). Generally, the spacer sequence comprises a polynucleotide sequence that is complementary to a target DNA and/or an invasive foreign (e.g., heterologous) DNA (e.g., a nucleotide sequence from a bacteriophage, plasmid or chromosome that is foreign to, for example, a bacterium or an archaeon). The spacer sequence can be at least 70% complementary (e.g., 70%, 71%, 72%, 73%, 74%, 75%, 76%, 77%, 78%, 79%, 80%, 81%, 82%, 83%, 84%, 85%, 86%, 87%, 88%, 89%, 90%, 91%, 92%, 93%, 94%, 95%, 96%, 97%, 98%, 99%, or 100% homologous) to the target or invasive foreign DNA. In representative embodiments, the spacer sequence is 100% complementary to the target or invasive foreign DNA. In other embodiments, the complementarity of the 3′ region of the spacer sequence to the target or invasive foreign DNA is 100% but is less than 100% in the 5′ region of the spacer. Thus, for example, the first 7, 8, 9, 10, 11, 12, 13, 14, 15, 16, and the like, nucleotides in the 3′ region of a 20 nucleotide spacer sequence (seed sequence) can be 100% complementary the target or invasive foreign DNA, while the remaining nucleotides in the 5′ region of the spacer sequence are at least about 70% complementary to the target or invasive foreign DNA. In representative embodiments, the first 12 nucleotides of the spacer sequence can be 100% complementary to the target or invasive foreign DNA, while the remaining nucleotides in the 5′ region of the spacer sequence be at least about 70% complementary to the target or invasive foreign DNA.

[0122] In some embodiments, a repeat for use with this invention can comprise, consist essentially of, or consist of a repeat from Lactobacillus spp., Bifidobacterium spp., Kandleria spp., Leuconostoc spp., Oenococcus spp., Pediococcus spp., Streptococcus spp., Weissella spp., and/or Olsenella spp. In some embodiments, a repeat from Lactobacillus spp., Bifidobacterium spp., Kandleria spp., Leuconostoc spp., Oenococcus spp., Pediococcus spp., Streptococcus spp., Weissella spp., and/or Olsenella spp. comprises, consists essentially of, or consists of a nucleotide sequence of any of SEQ ID NOs:1-98, or a functional fragment thereof.

[0123] The 5′ region of the tracRNA is described herein as complementary to the 3′ region (repeat) of the crRNA. In some embodiments, “complementary” means having at least about 70% or more (e.g., about 70%, 71%, 72%, 73%, 74%, 75%, 76%, 77%, 78%, 79%, 80%, 81%, 82%, 83%, 84%, 85%, 86%, 87%, 88%, 89%, 90%, 91%, 92%, 93%, 94%, 95%, 96%, 97%, 98%, 99%, or 100%) homology to the 3′ repeat of the crRNA. Thus, for example, the 5′ region of a tracRNA that is complementary to a 20 nucleotide sequence of a crRNA can have complementarity to about 14 out of 20 consecutive nucleotides of the crRNA repeat. In representative embodiments, the 5′ region of a tracRNA that is complementary to a 20 nucleotide sequence of a crRNA can have complementarity to at least 7 consecutive nucleotides (e.g., 7, 8, 9, 10, 11, 12, 13, 14, 15, 16, 17, 18, 19, 20 nucleotides) of the crRNA repeat. In some embodiments, a tracRNA can comprise, consist essentially of, or consist of a nucleotide sequence of any of SEQ ID NOs:99-193, or a functional fragment thereof. Thus, in some embodiments, a tracRNA useful with this invention can comprise, consist essentially of, or consist of a “functional” fragment of a nucleotide sequence of any of SEQ ID NOs:99-193, wherein said functional fragment retains the function of at least one of the motifs of a tracRNA as described herein (e.g., a nexus motif, a hairpin motif, a lower stem motif, an upper stem motif, and/or a bulge motif; see, e.g., FIG. 1). Therefore a functional fragment of a nucleotide sequence of any of SEQ ID NOs:99-193 can comprise, consist essentially of, consist of a nexus motif, a hairpin motif, a lower stem motif, an upper stem motif, a bulge motif and/or any combination thereof. In particular embodiments, a functional fragment of a tracRNA of the invention can comprise, consist essentially of, or consist of a nexus motif, and/or a hairpin motif (see e.g., FIG. 1). These motifs are involved in the binding (complementary (full and/or partial) hybridization) between the tracRNA and the crRNA to form a sgRNA (e.g., upper stem, bulge, lower stem) as well as the interaction between the tracRNA and the REC lobe of the Cas9 polypeptide (See, e.g., Barrangou, R. Science 344:707-708 (2104)).

[0124] The present invention further provides expression cassettes and/or vectors comprising or encoding the nucleotide sequences of this invention.

[0125] The present invention additionally provides a cell comprising nucleotide sequences, protein-RNA complexes, and/or the chimeric RNAs of this invention. A cell can be from any organism useful with this invention including, but not limited to, a plant cell, bacteria cell, fungal cell, mammalian cell, insect cell, or archaeon cell. In some embodiments, the cell can be, for example, from Homo sapiens, Drosophila melanogaster, Mus musculus, Rattus norvegicus, Caenorhabditis elegans, Saccharomyces cerevisiae, Zea mays, or Arabidopsis thaliana, and the like.

[0126] In a further embodiment of the invention, a method for site specific cleavage of a target DNA is provided, comprising contacting a protein-RNA complex of this invention with the target DNA, thereby producing a site specific cleavage of the target DNA in the region defined by the complementary binding of the spacer sequence of the crRNA to the target nucleic acid. In another embodiment of the invention, a method for site specific cleavage of a target DNA is provided, comprising contacting a chimeric RNA of this invention, or an expression cassette or vector comprising or encoding a chimeric RNA of this invention with the target DNA in the presence of a Cas9 polypeptide, thereby producing a site specific cleavage of the target nucleic acid in a region defined by complementary binding of the spacer sequence of the crRNA to the target DNA. (See, e.g., FIGS. 2-4)

[0127] In some embodiments, a method of transcriptional control of a target DNA is provided, the method comprising: contacting a protein-RNA complex of this invention with the target DNA, wherein the Cas9 polypeptide of the complex is deactivated and the complex binds to the target DNA, thereby controlling the transcription of the target DNA. In other embodiments, a method of transcriptional control of a target DNA is provided, the method comprising: contacting a chimeric RNA of this invention, or an expression cassette or vector comprising or encoding a chimeric RNA of this invention with the target DNA in the presence of an deactivated Cas9 polypeptide, wherein the chimeric RNA binds to the target DNA, thereby controlling the transcription of the target DNA. (See, FIG. 5, FIG. 6B,C)

[0128] “Transcriptional control” as used herein means modulating expression of a target DNA (i.e., activation (increasing) and/or repression (decreasing) expression of the target DNA) (see, e.g., FIGS. 6B and 6C). Thus, in some embodiments, an deactivated Cas9 polypeptide can be fused with a transcriptional activator, thereby activating transcription of a target DNA and increasing expression of said target DNA. Any transcriptional activator now known or later identified can be used with this invention in a fusion construct with a Cas9 polypeptide as described herein. A non-limiting example of such a transcriptional activator is VP64. Repression of expression can be accomplished by, for example, using a nuclease free Cas9 with the protein-RNA complexes or chimeric RNAs of this invention, which bind to the target nucleic acid and interfere with or repress expression of the target nucleic acid.

[0129] In other embodiments, the invention provides a method of editing a target DNA, comprising: contacting the target DNA with a protein-RNA complex of this invention, wherein the complex binds to the target DNA, thereby editing the target DNA. In still other embodiments, the invention provides a method of editing DNA of a target DNA, comprising: contacting the target DNA with a chimeric RNA of this invention, or an expression cassette or vector comprising or encoding a chimeric RNA of this invention in the presence of a Cas9 polypeptide, wherein the chimeric RNA binds to the target DNA, thereby editing the target DNA. (See, FIG. 6A)

[0130] In some embodiments, contacting a target DNA with a protein-RNA complex comprises contacting the target DNA with a protein-RNA complex encoded or comprised in an expression cassette or vector. Accordingly, in some embodiments, an expression cassette and/or vector can be constructed to express a Cas9 polypeptide and produce a tracRNA-crRNA (sgRNA). In other embodiments, a Cas9 polypeptide can be provided in combination with an expression cassette or vector comprising or encoding a sgRNA. In further embodiments, no expression cassette or vector is utilized, instead a protein-RNA complex itself can be contacted with the target DNA.

[0131] Additional embodiments of the invention provide a method for cleaving a double stranded polynucleotide, comprising contacting a protein-RNA complex, wherein the polynucleotide comprises, consists essentially of, or consists of (a) a protospacer sequence that is least about 80% (e.g., about 80%, 81%, 82%, 83%, 84%, 85%, 86%, 87%, 88%, 89%, 90%, 91%, 92%, 93%, 94%, 95%, 96%, 97%, 98%, 99%, or 100%) complementary to the spacer sequence in the crRNA in the complex, and (b) a protospacer adjacent motif (PAM) comprising, consisting essentially of, or consisting of a nucleotide sequence of 5′-NGG-3′, 5′-NGAAA-3′, 5′-NNG-3′, 5′-NGA-3′, 5′-NTAA-3′, 5′-NTG-3′, 5′-NNC-3′, 5′-NNAAC-3′, 5′-AGA-3′, 5′-NNNANNA-3′, 5′-NNANAA-3′, 5′-NNAAAA-3′, and/or 5′-AAAA-3′ downstream from the protospacer sequence, thereby cleaving the polynucleotide in the region defined by complementary binding of the spacer sequence of the crRNA of the protein-RNA complex to the polynucleotide. In some embodiments, the polypeptide of the complex cleaves both strands of the ds polynucleotide at a cleavage site located 0 to 3 nucleotides upstream of the PAM sequence to create blunt ends (i.e., cleaves 3nt upstream of the 3′ edge of the spacer sequence, which is 0 to 3 nucleotides away from the PAM sequence).

[0132] The present invention further provides a method for site specific cleavage of a target DNA, comprising contacting the target DNA with a CRISPR RNA (crRNA), said crRNA comprising a 5′ region and a 3′ region, and a trans-encoded CRISPR RNA (tracrRNA) comprising a 5′ region and a 3′ region in the presence of a Cas9 polypeptide, wherein (a) the crRNA comprises, consists essentially of, or consists of at its 3′ region a repeat from Lactobacillus spp., Bifidobacterium spp., Kandleria spp., Leuconostoc spp., Oenococcus spp., Pediococcus spp., Streptococcus spp., Weissella spp., and/or Olsenella spp., (e.g., SEQ ID NOs:1-98, or a functional fragment thereof) and at its 5′ region a spacer sequence from the target DNA, (b) the tracrRNA comprises, consists essentially of, or consists of a sequence at its 5′ region that is complementary to the repeat of the crRNA, and (c) the spacer sequence hybridizes with a portion of the target DNA that is complementary to the spacer sequence and adjacent to a protospacer adjacent motif (PAM) comprising, consisting essentially of, or consisting of the nucleotide sequence of any one of the nucleotide sequences of 5′-NGG-3′, 5′-NGAAA-3′, 5′-NNG-3′, 5′-NGA-3′, 5′-NTAA-3′, 5′-NTG-3′, 5′-NNC-3′, 5′-NNAAC-3′, 5′-AGA-3′, 5′-NNNANNA-3′, 5′-NNANAA-3′, 5′-NNAAAA-3′, and/or 5′-AAAA-3′, thereby resulting in a site specific cleavage of the target DNA in the region defined by the complementary binding of the spacer sequence of the crRNA to the target DNA. In some embodiments, the 3′ region of the crRNA comprises, consists essentially of, or consists of at least about 10 consecutive nucleotides of the repeat and the 5′ region of the crRNA comprises, consists essentially of, or consists of at least about 10 consecutive nucleotides of the spacer sequence. In further embodiments, the crRNA can comprise, consist essentially of, or consist of a nucleotide sequence of any one of the nucleotide sequences of SEQ ID NOs:1-98, and/or a functional fragment thereof, and/or the the tracrRNA can comprise, consist essentially of, or consist of a nucleotide sequence of any one of the nucleotide sequences of SEQ ID NOs:99-193, and/or a functional fragment thereof.

[0133] A Cas9 polypeptide or nuclease useful with this invention can be any Cas9 polypeptide from, for example, Lactobacillus spp., Bifidobacterium spp., Kandleria spp., Leuconostoc spp., Oenococcus spp., Pediococcus spp., Streptococcus spp., Weissella spp., and/or Olsenella spp. In some embodiments, a Cas9 polypeptide can comprise, consist essentially of, or consist of an amino acid sequence having at least about 80% (e.g., 80%, 81%, 82%, 83%, 84%, 85%, 86%, 87%, 88%, 89%, 90%, 91%, 92%, 93%, 94%, 95%, 96%, 97%, 98%, 99%, or 100%) identity to a polypeptide comprising the amino acid sequence of SEQ ID NOs:194-293, and/or a functional fragment thereof. Depending on the method for which it is being used, a Cas9 polypeptide can comprise the activity of an HNH and/or a RuvC nickase. In other embodiments, the Cas9 polypeptide is deactivated and therefore does not comprise HNH nickase activity. In some embodiments, the Cas9 polypeptide is deactivated and therefore does not comprise RuvC nickase activity. In still other embodiments, the Cas9 polypeptide is deactivated and therefore does not comprise RuvC nickase activity or HNH nickase activity. As described herein, Cas9 polypeptides are multifunctional proteins. Therefore, a Cas9 polypeptide that is deactivated with regard to either or both of the above described nickase activities, can still retain the polypeptide's other functions including DNA, RNA and PAM recognition and binding activity.

[0134] In other aspects of the invention, a method for site-specific nicking of a (+) strand of a double stranded target DNA is provided, the method comprising contacting a protein-RNA complex with a double stranded target DNA, wherein the complex comprises, consists essentially of, or consists of (a) a crRNA comprising, consisting essentially of, or consisting of a 3′ region and a 5′ region, wherein the 3′ region comprises, consists essentially of, or consists of at least about 10 consecutive nucleotides of a CRISPR repeat from a Lactobacillus spp., Bifidobacterium spp., Kandleria spp., Leuconostoc spp., Oenococcus spp., Pediococcus spp., Streptococcus spp., Weissella spp., and/or Olsenella spp., and the 5′ region comprises, consists essentially of, or consists of at least about 10 consecutive nucleotides of a spacer sequence located upstream of the repeat, (b) a tracRNA comprising a 5′ and 3′ region wherein at least a portion of the 5′ region of the tracRNA is complementary to the 3′ region (repeat) of the crRNA, and (c) a polypeptide comprising, consisting essentially of, or consisting of any of the amino acid sequences of SEQ ID NOs:194-293, and/or a functional fragment thereof, comprising a point mutation in the RuvC active site motif; and the target DNA comprises, consists essentially of, or consists of a protospacer sequence that is at least about 80% (e.g., 80%, 81%, 82%, 83%, 84%, 85%, 86%, 87%, 88%, 89%, 90%, 91%, 92%, 93%, 94%, 95%, 96%, 97%, 98%, 99%, or 100%) complementary to the spacer sequence in the crRNA and a protospacer adjacent motif (PAM) sequence of any one of the nucleotide sequences of 5′-NGG-3′, 5′-NGAAA-3′, 5′-NNG-3′, 5′-NGA-3′, 5′-NTAA-3′, 5′-NTG-3′, 5′-NNC-3′, 5′-NNAAC-3′, 5′-AGA-3′, 5′-NNNANNA-3′, 5′-NNANAA-3′, 5′-NNAAAA-3′, and/or 5′-AAAA-3′ downstream from the proto-spacer sequence, wherein the polypeptide cleaves the (+) strand of the double stranded DNA at a cleavage site located 5 nucleotides upstream of the PAM sequence, thereby producing a site-specific nick in said double stranded target DNA. Thus, by mutating the RuvC active site, the Cas9 polypeptide can no longer cut the (−) strand of the target DNA (the RuvC motif cuts the (−) strand 5 nucleotides upstream of the PAM), thereby resulting only in a cut in the (+) strand of the target DNA.

[0135] In a further aspect of the invention, a method for site-specific nicking of the (−) strand of a double stranded target DNA is provided, the method comprising contacting a protein-RNA complex with a double stranded target DNA, wherein the complex comprises, consists essentially of, or consists of (a) a crRNA comprising, consisting essentially of, or consisting of a 3′ region and a 5′ region, wherein the 3′ region comprises, consists essentially of, or consists of at least about 10 consecutive nucleotides of a CRISPR repeat from a Lactobacillus spp., Bifidobacterium spp., Kandleria spp., Leuconostoc spp., Oenococcus spp., Pediococcus spp., Streptococcus spp., Weissella spp., and/or Olsenella spp. and the 5′ region comprises, consists essentially of, or consists of at least about 10 consecutive nucleotides of a spacer sequence located a upstream of the repeat, and (b) a tracRNA comprising, consisting essentially of, or consisting of a 5′ and 3′ region wherein at least a portion of the 5′ region of the tracRNA is complementary to the 3′ region (repeat) of the crRNA, (c) a polypeptide comprising, consisting essentially of, or consisting of any of the amino acid sequences of SEQ ID NOs:194-293, and/or a functional fragment thereof, comprising a point mutation in an HNH active site motif; and the target DNA comprises, consists essentially of, or consists of a protospacer sequence that is at least about 80% complementary to the spacer sequence in the crRNA and a protospacer adjacent motif (PAM) sequence comprising a nucleotide sequence of any one of the nucleotide sequences of 5′-NGG-3′, 5′-NGAAA-3′, 5′-NNG-3′, 5′-NGA-3′, 5′-NTAA-3′, 5′-NTG-3′, 5′-NNC-3′, 5′-NNAAC-3′, 5′-AGA-3′, 5′-NNNANNA-3′, 5′-NNANAA-3′, 5′-NNAAAA-3′, and/or 5′-AAAA-3′ downstream from the proto-spacer sequence, wherein the polypeptide cleaves the (−) strand of the double stranded DNA at a cleavage site located 5 nucleotides upstream of the PAM sequence resulting in site-specific nicking of the target DNA. By providing a Cas9 comprising a mutation in an HNH active site, the Cas9 polypeptide can no longer cut the (+) strand of the target DNA (the HNH motif cuts the (+) strand 5nt upstream of the PAM), thereby resulting only in a cut in the (+) strand of the target DNA.

[0136] A CRISPR repeat from a Lactobacillus spp., Bifidobacterium spp., Kandleria spp., Leuconostoc spp., Oenococcus spp., Pediococcus spp., Streptococcus spp., Weissella spp., and/or Olsenella spp. useful for site specific nicking can include any one of the nucleotide sequences of SEQ ID NOs:1-98 or a functional fragment thereof. A tracRNA useful for site specific nicking can include any one of the nucleotide sequences of SEQ ID NOs:99-193, or a functional fragment thereof. Thus, for example, in some embodiments, a tracRNA can comprise, consist essentially of, or consist of a fragment of a nucleotide sequence of any of SEQ ID NOs:99-193, wherein said fragment comprises, consists essentially of, consists of a nexus motif, a hairpin motif, a lower stem motif, an upper stem motif, a bulge motif and/or a combination thereof (see e.g., FIG. 1). In particular embodiments, a fragment of a tracRNA can comprise, consist essentially of, or consist of a fragment of a nucleotide sequence of any of SEQ ID NOs:99-193, wherein said fragment comprises, consists essentially of, consists of the nexus motif and the hairpin motif.

[0137] A further embodiment of the invention provides a method for site-specific cleavage of a target DNA in vivo, the method comprising: introducing a protein-RNA complex into at least one cell, wherein the protein-RNA complex comprises, consists essentially of, or consists of a crRNA comprising in its 3′ region a repeat from Lactobacillus spp., Bifidobacterium spp., Kandleria spp., Leuconostoc spp., Oenococcus spp., Pediococcus spp., Streptococcus spp., Weissella spp., and/or Olsenella spp., and in its 5′ region a spacer sequence having complementarity to a site in the target DNA in which a modification is desired; and a polypeptide having at least about 80% identity with a Cas9 polypeptide of Lactobacillus spp., Bifidobacterium spp., Kandleria spp., Leuconostoc spp., Oenococcus spp., Pediococcus spp., Streptococcus spp., Weissella spp., or Olsenella spp., and a tracrRNA comprising, consisting essentially of, or consisting of a sequence at its 5′ region that is complementary to the repeat of the crRNA, thereby producing a site-specific cleavage of the target DNA molecule in a region that is determined by the complementary spacer sequence of the crRNA to the target DNA molecule. In some embodiments, the target DNA contains a protospacer sequence that is least 80% complementary to the spacer sequence in the crRNA of the protein-RNA complex, and a protospacer adjacent motif (PAM) sequence comprising, consisting essentially of, or consisting of a nucleotide sequence of any of the nucleotide sequences of 5′-NGG-3′, 5′-NGAAA-3′, 5′-NNG-3′, 5′-NGA-3′, 5′-NTAA-3′, 5′-NTG-3′, 5′-NNC-3′, 5′-NNAAC-3′, 5′-AGA-3′, 5′-NNNANNA-3′, 5′-NNANAA-3′, 5′-NNAAAA-3′, and/or 5′-AAAA-3′ downstream from the proto-spacer sequence, wherein the polypeptide cleaves both target DNA strands at the cleavage site located 5 nucleotides upstream of the PAM sequence to create blunt ends.

[0138] Once the DNA is cleaved, it can then be modified by repair mechanisms as known in the art, notably non-homologous end-joining (NHEJ) and homology-directed repair (HDR). Thus, in some embodiments, a donor DNA can be provided for assisting in repair, such as a dsDNA template for homologous recombination in HDR-mediated repair. See, e.g., FIG. 6A, which provides a non-limiting cartoon depiction of genome editing using a Cas9 polypeptide and guide RNAs as described herein.

[0139] In representative embodiments, the polypeptide having at least about 80% identity with a Cas9 polypeptide can comprise, consist essentially of, or consist of an amino acid sequence of any of the amino acid sequences of SEQ ID NOs:194-293, and/or a functional fragment thereof, or a functional fragment thereof, the crRNA can comprise, consist essentially of, or consist of a nucleotide sequence of any one of the nucleotide sequences of SEQ ID NOs:1-98, and/or a functional fragment thereof, and/or the tracrRNA can comprise, consist essentially of, or consist of a nucleotide sequence of any one of the nucleotide sequences of SEQ ID NOs:99-193, and/or a functional fragment thereof.

[0140] In some embodiments, the polypeptide having at least about 80% identity with a Cas9 polypeptide can be codon optimized for the organism comprising the target DNA as described herein and as known in the art. Non-limiting examples of the types of organisms useful with this invention include plants, bacteria, fungi, mammals, insects, or archaea. Accordingly, in some embodiments, the polypeptide, and/or a functional fragment thereof, having at least about 80% identity with a Cas9 polypeptide (e.g., SEQ ID NOs:194-293, and/or a functional fragment thereof) can be codon optimized to be expressed in the organism comprising the target DNA.

[0141] In some embodiments, a repeat, a tracRNA sequence, a Cas9 polypeptide or and/or a Cas9 nucleotide sequence can be from Lactobacillus spp., Bifidobacterium spp., Kandleria spp., Leuconostoc spp., Oenococcus spp., Pediococcus spp., Streptococcus spp., Weissella spp., or Olsenella spp. In representative embodiments, a repeat, a tracRNA sequence, a Cas9 polypeptide or and/or a Cas9 nucleotide sequence can be from Bifidobacterium bombi, Bifidobacterium dentium LMG 11045, Bifidobacterium merycicum LMG 11341, Kandleria vitulina DSM 20405, Lactobacillus agilis DSM 20509, Lactobacillus animalis DSM 20602, Lactobacillus apodemi DSM 16634, Lactobacillus brevis subsp gravensis ATCC 27305, Lactobacillus buchneri CD034, Lactobacillus buchneri DSM 20057, Lactobacillus cacaonum DSM 21116, Lactobacillus casei str Zhang, Lactobacillus ceti DSM 22408, Lactobacillus coryniformis subsp coryniformis KCTC 3167, Lactobacillus coryniformis torquens, Lactobacillus crispatus FB049-03, Lactobacillus curvatus CRL 705, Lactobacillus delbrueckii subsp lactis CRL 581, Lactobacillus delbrueckii jakobsenii DSM 26046, Lactobacillus diolivorans DSM 14421, Lactobacillus farciminis DSM 20184, Lactobacillus fermentum DSM 20055, Lactobacillus floricola DSM 23037A, Lactobacillus fioricola DSM 23037B, Lactobacillus fuchuensis DSM 14340, Lactobacillus futsaii JCM 17355, Lactobacillus gasseri K7, Lactobacillus graminis DSM 20719, Lactobacillus hammesii DSM 16381, Lactobacillus hominis CRBIP, Lactobacillus hordei DSM 19519A, Lactobacillus hordei DSM 19519B, Lactobacillus jensenii DSM 20557, Lactobacillus johnsonii DPC 6026, Lactobacillus lindneri DSM 20690, Lactobacillus mali ATCC 27304, Lactobacillus mindensis DSM 14500, Lactobacillus mucosae DSM 13345, Lactobacillus namurensis DSM 19117, Lactobacillus nantensis DSM 16982, Lactobacillus nodensis DSM 19682A, Lactobacillus nodensis DSM 19682B, Lactobacillus oligofermentans DSM 15707, Lactobacillus otakiensis DSM 19908, Lactobacillus ozensis DSM 23829, Lactobacillus paracasei subsp paracasei 8700:2, Lactobacillus paracasei subsp tolerans Lp17, Lactobacillus paracollinoides DSM 15502, Lactobacillus parakefiri DSM 10551, Lactobacillus pentosus KCA1, Lactobacillus pentosus IG1, Lactobacillus plantarum EGD-AQ4, Lactobacillus psittaci DSM 15354, Lactobacillus rennini DSM 20253, Lactobacillus reuteri mlc3, Lactobacillus rhamnosus GG, Lactobacillus rossiae DSM 15814, Lactobacillus ruminis ATCC 25644, Lactobacillus sakei carnosus DSM 15831, Lactobacillus salivarius TCC 118, Lactobacillus sanfranciscensis DSM 20451, Lactobacillus saniviri DSM 24301, Lactobacillus senmaizukei DSM 21775, Lactobacillus tucceti DSM 20183, Lactobacillus versmoldensis DSM 14857, Lactobacillus zymae DSM 19395, Leuconostoc gelidum JB7, Leuconostoc pseudomesenteroides 4882, Oenococcus kitaharae DSM 17330, Pediococcus inopinatus DSM 20285, Pediococcus lolii DSM 19927, Pediococcus parvulus DSM 20332A, Pediococcus parvulus DSM 20332B, Pediococcus stilesii DSM 18001, Streptococcus agalactiae GB00300, Streptococcus gallolyticus ATCC BAA-2069, Streptococcus henryi DSM 19005, Streptococcus mutans NLMLS, Streptococcus oralis SK304, Streptococcus anginosus 1_2_62 CV, Streptococcus anginosus DSM 20563, Streptococcus dysagalactiae subsp equisimilis, Streptococcus equi subsp zooepidemicus, Streptococcus gordonii Challis substr CH1, Streptococcus infantarius subsp infantarius, Streptococcus intermedius B196, Streptococcus lutetiensis 033, Streptococcus mitis SK321, Streptococcus mutans UA 159, Streptococcus orisratti DSM 15617, Streptococcus parasanguinis F0449, Streptococcus salivarius K12, Streptococcus sanguinis SK330, Streptococcus vestibularis ATCC 49124, Lactobacillus composti DSM 18527, Lactobacillus concavus DSM 17758, Lactobacillus secaliphilus DSM 17896, Weissella halotolerans DSM 20190, Weissella kandleri DSM 20593, and/or Olsenella uli or any combination thereof.

[0142] In some embodiments, combinations of repeats, tracRNA sequences, Cas9 polypeptide sequences and Cas9 nucleotide sequences that may be useful with this invention are set forth in Table 1.

TABLE 1
Combinations of repeats, tracRNA sequences, and Cas9
polypeptides and nucleic acid sequences useful with
the invention.

| | TracRNA | Cas9 | Cas9 | |
|---|---|---|---|---|
| | sequence | polypeptide | nucleotide | |
| Repeat | (SEQ | sequence | sequence | PAM |
| (SEQ ID NO) | ID NO) | (SEQ ID NO) | (SEQ ID NO) | Sequence |
| 1 | | 194 | 294 | nnC |
| 2 | 99 | 195 | 295 | |
| 3 | 100 | 196 | 296 | nGG |
| 4 | 101 | 197 | 297 | |
| 5 | 102 | 198 | 298 | nGG |
| 6 | 103 | 199 | 299 | |
| 7 | 104 | 200 | 300 | |
| 8 | 105 | 201 | 301 | nnAAAA |
| 9 | 106 | 202 | 303 | |
| 10 | 107 | 203 | 302 | nnnAnnA |
| 11 | 108 | 204 | 304 | |
| 12 | 109 | 205 | 305 | nGA |
| 13 | 110 | 206 | 306 | |
| 14 | 111 | 207 | | |
| 15 | | 208 | 307 | |
| 16 | 112 | 209 | | |
| 17 | 113 | 210 | 308 | |
| 18 | 114 | 211 | 309 | |
| 19 | 115 | 212 | 310 | |
| 20 | 116 | 213 | 311 | |
| 21 | 117 | 214 | 312 | |
| 22 | 118 | 215 | 313 | |
| 23 | 119 | 216 | 314 | |
| 24 | 120 | 217 | 315 | |
| 25 | 121 | 218 | 316 | |
| 26 | 122 | 219 | 317 | |
| 27 | 123 | 220 | 318 | nTAA |
| 28 | 124 | 221 | 319 | |
| 29 | 125 | 222 | 320 | |
| 30 | 126 | 223 | 321 | |
| 31 | 127 | 224 | 322 | |
| 32 | 128 | 225 | 323 | |
| 33 | 129 | 226 | 324 | nGG |
| 34 | 130 | 227 | 325 | |
| 35 | 131 | 228 | 326 | |
| 36 | 132 | 229 | 327 | nnAnAA |
| 37 | 133 | 230 | 328 | |
| 38 | 134 | 231 | 329 | |
| 39 | 135 | 232 | 330 | |
| 40 | 136 | 233 | 331 | |
| 41 | 137 | 234 | 332 | |
| 42 | 138 | 235 | 333 | |
| 43 | 139 | 236 | 334 | |
| 44 | 140 | 237 | 335 | |
| 45 | 141 | 238 | 336 | |
| 46 | 142 | 239 | 337 | |
| 47 | 143 | 240 | 338 | |
| 48 | 144 | 241 | 339 | |
| 49 | 145 | 241 | 340 | |
| 50 | 146 | 243 | 342 | |
| 51 | 147 | 244 | 341 | nnG |
| 52 | 148 | 245 | 343 | |
| 53 | 149 | 246 | 344 | |
| 54 | 150 | 247 | 345 | |
| 55 | 151 | 248 | | nGAAA |
| 56 | 152/153 | 249/250 | 346 | |
| 57 | 154 | 251 | 347 | |
| 58 | 155 | 252 | 348 | |
| 59 | 156 | 253 | 349 | |
| 60 | 157 | 254 | 350 | |
| 61 | 158 | 255 | 351 | |
| 62 | 159 | 256 | 352 | |
| 63 | 160 | 257 | 353 | |
| 64 | 161 | 258 | 354 | |
| 65 | 162 | 259 | 355 | |
| 66 | 163 | 260 | 356 | |
| 67 | 164 | 261 | 357 | |
| 68 | 165 | 262 | 358 | |
| 69 | 166 | 263 | 359 | nTG |
| 70 | 167 | 264 | 360 | |
| 71 | 168 | 265 | 361 | |
| 72 | 169 | 266 | 362 | AGA |
| 73 | 170 | 267 | 363 | nnAAC |
| 74 | 171 | 268 | 364 | |
| 75 | 172 | 269 | 365 | |
| 76 | 173 | 270 | 366 | |
| 77 | 174 | 271 | | |
| 78 | 175 | 272 | 367 | |
| 79 | 176 | 273 | 368 | |
| 80 | 177 | 274 | 369 | |
| 81 | 178 | 275 | 370 | |
| 82 | 179 | 276 | 371 | |
| 83 | 180 | 277 | 372 | |
| 84 | 181 | 278 | 373 | |
| 85 | 182 | 279 | 374 | |
| 86 | 183 | 280 | 375 | |
| 87 | 184 | 281 | 376 | |
| 88 | 185 | 282 | 377 | |
| 89 | 186 | 283 | 378 | |
| 90 | 187 | 284 | 379 | |
| 91 | 188 | 285 | 380 | |
| 92 | 189 | 286 | 381 | |
| 93 | 190 | 287 | 382 | |
| 94 | 191 | 288 | 383 | |
| 95 | 192 | 289 | 384 | |
| 96 | 193 | 290 | 385 | |
| 97 | | 291 | 386 | |
| 98 | | 292 | 387 | |

[0143] The present invention further provides a method of typing a bacterial or archaeon strain in a sample, comprising amplifying in said sample a region of DNA comprising repetitive sequences that are at least about 80% identical to a nucleotide sequence of SEQ ID NOs:1-98, or a functional fragment thereof, to produce amplified DNA; and typing the bacterial strain based on the amplified DNA. In further embodiments, the method further comprises sequencing the amplified DNA to produce sequence information; and typing the bacterial strain based on the sequence information. In additional embodiments, typing a bacterial strain further comprises contacting the amplified DNA with one or more restriction enzymes capable of cutting the DNA at at least one site to produce restriction fragments; determining the number and/or size of the restriction fragments; and typing the bacterial strain based on the number and/or size of the restriction fragments. “Determining the number and/or size of the restriction fragments” as used herein can mean analyzing the restriction fragments using, for example, agarose gel elextrophoresis and the like as is known in the art.

[0144] In still other embodiments, the present invention provides a method of detecting the presence of a Lactobacillus spp., Bifidobacterium spp., Kandleria spp., Leuconostoc spp., Oenococcus spp., Pediococcus spp., Streptococcus spp., Weissella spp., and/or Olsenella spp. in a sample, comprising amplifying in said sample a region of DNA comprising repetitive sequences that are at least about 80% identical to the repetitive sequence encoded by a nucleotide sequence of any of the nucleotide sequences of SEQ ID NOs:1-98, or a functional fragment thereof, to produce amplified DNA, and detecting the amplified DNA.

[0145] In some embodiments, amplifying a region of DNA comprises amplifying at least about 20 to about 300 consecutive nucleotides of a region of DNA comprising repetitive sequences. Thus, in some embodiments, amplifying a region of DNA comprises amplifying at least about 20, 25, 23, 35, 40, 45, 50, 55, 60, 65, 70, 75, 80, 85, 90, 95, 100, 110, 120, 130, 140, 150, 160, 170, 180, 190, 200, 210, 220, 230, 240, 250, 260, 270, 280, 290, 300, or more and the like and any range or value therein of consecutive nucleotides of a region of DNA comprising repetitive sequences Any method of amplifying DNA known in the art and later developed can be used with this invention. A nonlimiting example of a method of amplifying includes polymerase chain reaction (PCR) as described herein and as known in the art. In some embodiments of this invention, amplifying a region of DNA comprises amplifying at least a single spacer and two repeat elements on either side of the single spacer in the repeat-spacer region of a Lactobacillus spp., Bifidobacterium spp., Kandleria spp., Leuconostoc spp., Oenococcus spp., Pediococcus spp., Streptococcus spp., Weissella spp., and/or Olsenella spp. In some embodiments of this invention, amplifying a region of DNA comprises amplifying at least about 50, at least about 100, at least about 150, at least about 200, at least about 250, at least about 300, at least about 350 consecutive nucleotides in the repeat-spacer region of a Lactobacillus spp., Bifidobacterium spp., Kandleria spp., Leuconostoc spp., Oenococcus spp., Pediococcus spp., Streptococcus spp., Weissella spp., and/or Olsenella spp.

[0146] As would be understood by those of skill in the art, when amplifying a portion of a repeat-spacer region of a Lactobacillus spp., Bifidobacterium spp., Kandleria spp., Leuconostoc spp., Oenococcus spp., Pediococcus spp., Streptococcus spp., Weissella spp., and/or Olsenella spp., any primer pair designed to comprise conserved sequences flanking the repeat-spacer array could be used.

[0147] Further embodiments of the invention provide a method of identifying a strain of Lactobacillus spp., Bifidobacterium spp., Kandleria spp., Leuconostoc spp., Oenococcus spp., Pediococcus spp., Streptococcus spp., Weissella spp., and/or Olsenella spp. having resistance to an invasive foreign DNA, comprising correlating the presence of a CRISPR spacer with resistance to said invasive foreign DNA (e.g., phage DNA, plasmid DNA, chromosomal DNA, transposon DNA) in Lactobacillus spp., Bifidobacterium spp., Kandleria spp., Leuconostoc spp., Oenococcus spp., Pediococcus spp., Streptococcus spp., Weissella spp., and/or Olsenella spp. having a CRISPR system; and detecting said CRISPR spacer in said strain of a Lactobacillus spp., Bifidobacterium spp., Kandleria spp., Leuconostoc spp., Oenococcus spp., Pediococcus spp., Streptococcus spp., Weissella spp., and/or Olsenella spp., thereby identifying said strain as comprising said CRISPR spacer and having resistance to said invasive foreign DNA.

[0148] As used herein, “correlate,” “correlating” and grammatical variations thereof mean to establish or establishing an association, a relationship, or a close connection between two or more things. Thus, for example, correlating can mean establishing an association of the presence of one or more particular spacers in a Lactobacillus spp., Bifidobacterium spp., Kandleria spp., Leuconostoc spp., Oenococcus spp., Pediococcus spp., Streptococcus spp., Weissella spp., and/or Olsenella spp. strain exhibiting resistance to particular invasive foreign DNA. In the context of identifying a Lactobacillus spp., Bifidobacterium spp., Kandleria spp., Leuconostoc spp., Oenococcus spp., Pediococcus spp., Streptococcus spp., Weissella spp., and/or Olsenella spp., “correlating” means amplifying spacer sequences in a resistant strain of Lactobacillus spp., Bifidobacterium spp., Kandleria spp., Leuconostoc spp., Oenococcus spp., Pediococcus spp., Streptococcus spp., Weissella spp., and/or Olsenella spp., sequencing the amplified spacer sequences and identifying the origin of the spacer sequence by aligning the amplified spacer sequence with protospacer sequences from invasive foreign genomes.

[0149] In representative embodiments, detecting comprises amplifying the DNA of said strain of Lactobacillus spp., Bifidobacterium spp., Kandleria spp., Leuconostoc spp., Oenococcus spp., Pediococcus spp., Streptococcus spp., Weissella spp., and/or Olsenella spp. using amplification primers for amplifying the CRISPR spacer correlated with resistance, to produce a CRISPR spacer amplicon when said CRISPR spacer is present, thereby detecting the presence or absence of said CRISPR spacer amplicon.

[0150] Methods of visualizing or detecting the presence or absence of a CRSIPR spacer amplicon are well-known in the art and include, for example, gel electrophoresis, sequencing, hybridization and the like.

[0151] Other embodiments of the invention provide methods for modifying resistance of a bacterium or an archaeon to an invasive foreign DNA that comprises a target DNA, comprising introducing into cells of said bacterium or archaeon a heterologous nucleic acid molecule comprising, consisting essentially of, or consisting of a first and a second CRISPR repeat from Lactobacillus spp., Bifidobacterium spp., Kandleria spp., Leuconostoc spp., Oenococcus spp., Pediococcus spp., Streptococcus spp., Weissella spp., and/or Olsenella spp. and a CRISPR spacer, wherein the spacer is homologous to at least a portion of the invasive foreign DNA and is located 3′ of the first CRISPR repeat and 5′ of the second CRISPR repeat to produce transformed bacterial or archaea cells, and selecting transformed bacterial or archaea cells having modified resistance to said invasive foreign DNA.

[0152] As used herein “modifying the resistance” means conferring or increasing resistance in a bacterium or an archaeon to a particular invasive foreign DNA. If the bacterium or archeaon did not have any resistance to the particular invasive foreign DNA prior to the modification, then resistance is conferred upon the bacteria to said invasive foreign DNA by introducing the heterologous nucleic acid molecule of the invention into the cells of said bacterium or archaeaon, thereby providing a level of resistance to said invasive foreign DNA that is greater than that observed to said invasive foreign DNA in a control (e.g., a control bacterium or archaeaon not comprising said heterologous nucleic acid molecule of the invention). However, if the bacterium or archaeon displayed some level of resistance to said invasive foreign DNA prior to the modification, by introducing the heterologous nucleic acid molecule of the invention into the cells of said bacterium or archaeon, the level of resistance to said invasive foreign DNA in said bacterium or archaeon can be increased as compared to the level of resistance to said invasive foreign DNA in a control bacterium or archaeon (e.g., a bacterium or an archaeon not comprising the heterologous nucleic acid molecule of the invention). In representative embodiments, the bacterium to which resistance to a particular invasive foreign DNA can be modified can be Lactobacillus spp., Bifidobacterium spp., Kandleria spp., Leuconostoc spp., Oenococcus spp., Pediococcus spp., Streptococcus spp., Weissella spp., and/or Olsenella spp.

[0153] In some embodiments, the first and second CRISPR repeats of the heterologous nucleic acid molecule comprise, consist essentially of, or consist of at least about 10 consecutive nucleotides of a repeat from a Lactobacillus spp., Bifidobacterium spp., Kandleria spp., Leuconostoc spp., Oenococcus spp., Pediococcus spp., Streptococcus spp., Weissella spp., and/or Olsenella spp. and the CRISPR spacer comprises, consists essentially of, or consists of at least about 10 consecutive nucleotides of the invasive foreign DNA. In some embodiments, the first and second CRISPR repeats comprise, consist essentially of, or consist of a nucleotide sequence of any of the nucleotide sequences of SEQ ID NOs:1-98, a functional fragment thereof, or any combination thereof. In other embodiments, the spacer sequence can be at least about 80% identical to the at least a portion of the invasive foreign DNA. In still other embodiments, at least about 10 consecutive nucleotides at the 3′ end of the CRISPR spacer can be 100% identical to the at least a portion of the invasive foreign DNA.

[0154] In some embodiments, bacteria and archaea that can be typed, detected, identified or modified using methods of this invention include, but are not limited to, those from the genera of Lactobacillus spp., Bifidobacterium spp., Kandleria spp., Leuconostoc spp., Oenococcus spp., Pediococcus spp., Streptococcus spp., Weissella spp., and/or Olsenella spp. In other embodiments, the bacteria and/or archaea that can be typed, detected, identified or modified using the methods of this invention, include but are not limited to Bifidobacterium bombi, Bifidobacterium dentium LMG 11045, Bifidobacterium merycicum LMG 11341, Kandleria vitulina DSM 20405, Lactobacillus agilis DSM 20509, Lactobacillus animalis DSM 20602, Lactobacillus apodemi DSM 16634, Lactobacillus brevis subsp gravensis ATCC 27305, Lactobacillus buchneri CD034, Lactobacillus buchneri DSM 20057, Lactobacillus cacaonum DSM 21116, Lactobacillus casei str Zhang, Lactobacillus ceti DSM 22408, Lactobacillus coryniformis subsp coryniformis KCTC 3167, Lactobacillus coryniformis torquens, Lactobacillus crispatus FB049-03, Lactobacillus curvatus CRL 705, Lactobacillus delbrueckii subsp lactis CRL 581, Lactobacillus delbrueckii jakobsenii DSM 26046, Lactobacillus diolivorans DSM 14421, Lactobacillus farciminis DSM 20184, Lactobacillus fermentum DSM 20055, Lactobacillus floricola DSM 23037A, Lactobacillus floricola DSM 23037B, Lactobacillus fuchuensis DSM 14340, Lactobacillus futsaii JCM 17355, Lactobacillus gasseri K7, Lactobacillus graminis DSM 20719, Lactobacillus hammesii DSM 16381, Lactobacillus hominis CRBIP, Lactobacillus hordei DSM 19519A, Lactobacillus hordei DSM 19519B, Lactobacillus jensenii DSM 20557, Lactobacillus johnsonii DPC 6026, Lactobacillus lindneri DSM 20690, Lactobacillus mali ATCC 27304, Lactobacillus mindensis DSM 14500, Lactobacillus mucosae DSM 13345, Lactobacillus namurensis DSM 19117, Lactobacillus nantensis DSM 16982, Lactobacillus nodensis DSM 19682A, Lactobacillus nodensis DSM 19682B, Lactobacillus oligofermentans DSM 15707, Lactobacillus otakiensis DSM 19908, Lactobacillus ozensis DSM 23829, Lactobacillus paracasei subsp paracasei 8700:2, Lactobacillus paracasei subsp tolerans Lp17, Lactobacillus paracollinoides DSM 15502, Lactobacillus parakefiri DSM 10551, Lactobacillus pentosus KCA1, Lactobacillus pentosus IG1, Lactobacillus plantarum EGD-AQ4, Lactobacillus psittaci DSM 15354, Lactobacillus rennini DSM 20253, Lactobacillus reuteri mlc3, Lactobacillus rhamnosus GG, Lactobacillus rossiae DSM 15814, Lactobacillus ruminis ATCC 25644, Lactobacillus sakei carnosus DSM 15831, Lactobacillus salivarius UCC 118, Lactobacillus sanfranciscensis DSM 20451, Lactobacillus saniviri DSM 24301, Lactobacillus senmaizukei DSM 21775, Lactobacillus tucceti DSM 20183, Lactobacillus versmoldensis DSM 14857, Lactobacillus zymae DSM 19395, Leuconostoc gelidum JB7, Leuconostoc pseudomesenteroides 4882, Oenococcus kitaharae DSM 17330, Pediococcus inopinatus DSM 20285, Pediococcus lolii DSM 19927, Pediococcus parvulus DSM 20332A, Pediococcus parvulus DSM 20332B, Pediococcus stilesii DSM 18001, Streptococcus agalactiae GB00300, Streptococcus gallolyticus ATCC BAA-2069, Streptococcus henryi DSM 19005, Streptococcus mutans NLMLS, Streptococcus oralis SK304, Streptococcus anginosus 1_2_62 CV, Streptococcus anginosus DSM 20563, Streptococcus dysagalactiae subsp equisimilis, Streptococcus equi subsp zooepidemicus, Streptococcus gordonii Challis substr CH1, Streptococcus infantarius subsp infantarius, Streptococcus intermedius B196, Streptococcus lutetiensis 033, Streptococcus mitis SK321, Streptococcus mutans UA 159, Streptococcus orisratti DSM 15617, Streptococcus parasanguinis F0449, Streptococcus salivarius K12, Streptococcus sanguinis SK330, Streptococcus vestibularis ATCC 49124, Lactobacillus composti DSM 18527, Lactobacillus concavus DSM 17758, Lactobacillus secaliphilus DSM 17896, Weissella halotolerans DSM 20190, Weissella kandleri DSM 20593, and/or Olsenella uli

[0155] The invention will now be described with reference to the following examples. It should be appreciated that these examples are not intended to limit the scope of the claims to the invention, but are rather intended to be exemplary of certain embodiments. Any variations in the exemplified methods that occur to the skilled artisan are intended to fall within the scope of the invention.

### Examples

### Example 1. Characterization of CRISPR Repeat, tracRNA, Cas9 Polypeptide and PAM Sequences from Different Species and Strains of Bacteria and Archaea

[0156] CRISPR repeat, tracRNA, Cas9 polypeptide and PAM sequences were isolated from different species and strains of bacteria and archae. The list of bacterial/archaea species/strains from which at least a CRISPR repeat (e.g., SEQ ID NOs:1-98), tracRNA sequence (e.g., SEQ ID NOs:99-193), Cas9 polypeptide sequence (e.g., SEQ ID NOs:194-293), or a PAM sequence (Table 3, below) was isolated is provided in Table 2, below.

TABLE 2
Bacteria and Archaea species and strains of this study

Bifidobacterium bombi
Bifidobacterium dentium LMG 11045
Bifidobacterium merycicum LMG 11341
Kandleria vitulina DSM 20405
Lactobacillus agilis DSM 20509
Lactobacillus animalis DSM 20602
Lactobacillus apodemi DSM 16634
Lactobacillus brevis subsp gravensis ATCC 27305
Lactobacillus buchneri CD034
Lactobacillus buchneri DSM 20057
Lactobacillus cacaonum DSM 21116
Lactobacillus casei str Zhang
Lactobacillus ceti DSM 22408
Lactobacillus coryniformis subsp coryniformis KCTC
3167
Lactobacillus coryniformis torquens
Lactobacillus crispatus FB049-03
Lactobacillus curvatus CRL 705
Lactobacillus delbrueckii subsp lactis CRL 581
Lactobacillus delbrueckii jakobsenii DSM 26046
Lactobacillus diolivorans DSM 14421
Lactobacillus farciminis DSM 20184
Lactobacillus fermentum DSM 20055
Lactobacillus floricola DSM 23037A
Lactobacillus floricola DSM 23037B
Lactobacillus fuchuensis DSM 14340
Lactobacillus futsaii JCM 17355
Lactobacillus gasseri K7
Lactobacillus graminis DSM 20719
Lactobacillus hammesii DSM 16381
Lactobacillus hominis CRBIP
Lactobacillus hordei DSM 19519A
Lactobacillus hordei DSM 19519B
Lactobacillus jensenii DSM 20557
Lactobacillus johnsonii DPC 6026
Lactobacillus lindneri DSM 20690
Lactobacillus mali ATCC 27304
Lactobacillus mindensis DSM 14500
Lactobacillus mucosae DSM 13345
Lactobacillus namurensis DSM 19117
Lactobacillus nantensis DSM 16982
Lactobacillus nodensis DSM 19682A
Lactobacillus nodensis DSM 19682B
Lactobacillus oligofermentans DSM 15707
Lactobacillus otakiensis DSM 19908
Lactobacillus ozensis DSM 23829
Lactobacillus paracasei subsp paracasei 8700:2
Lactobacillus paracasei subsp tolerans Lpl7
Lactobacillus paracollinoides DSM 15502
Lactobacillus parakefiri DSM 10551
Lactobacillus pentosus KCA1
Lactobacillus pentosus IG1
Lactobacillus plantarum EGD-AQ4
Lactobacillus psittaci DSM 15354
Lactobacillus rennini DSM 20253
Lactobacillus reuteri mlc3
Lactobacillus rhamnosus GG
Lactobacillus rossiae DSM 15814
Lactobacillus ruminis ATCC 25644
Lactobacillus sakei carnosus DSM 15831
Lactobacillus salivarius UCC 118
Lactobacillus sanfranciscensis DSM 20451
Lactobacillus saniviri DSM 24301
Lactobacillus senmaizukei DSM 21775
Lactobacillus tucceti DSM 20183
Lactobacillus versmoldensis DSM 14857
Lactobacillus zymae DSM 19395
Leuconostoc gelidum JB7
Leuconostoc pseudomesenteroides 4882
Oenococcus kitaharae DSM 17330
Pediococcus inopinatus DSM 20285
Pediococcus lolii DSM 19927
Pediococcus parvulus DSM 20332A
Pediococcus parvulus DSM 20332B
Pediococcus stilesii DSM 18001
Steptococcus agalactiae GB00300
Steptococcus gallolyticus ATCC BAA-2069
Steptococcus henryi DSM 19005
Steptococcus mutans NLML5
Steptococcus oralis SK304
Streptococcus anginosus 1_2_62CV
Streptococcus anginosus DSM 20563
Streptococcus dysagalactiae subsp equisimilis
Streptococcus equi subsp zooepidemicus
Streptococcus gordonii Challis substr CH1
Streptococcus infantarius subsp infantarius
Streptococcus intermedius B196
Streptococcus lutetiensis 033
Streptococcus mitis SK321
Streptococcus mutans UA 159
Streptococcus orisratti DSM 15617
Streptococcus parasanguinis F0449
Streptococcus salivarius K12
Streptococcus sanguinis SK330
Streptococcus vestibularis ATCC 49124
Lactobacillus composti DSM 18527
Lactobacillus concavus DSM 17758
Lactobacillus secaliphilus DSM 17896
Weissella halotolerans DSM 20190
Weissella kandleri DSM 20593
Olsenella uli

TABLE 3
PAM consensus sequences recognized by the
CRISPR-Cas system of the listed organism

| Organism | PAM |
|---|---|
| Bifidobacterium merycicum | nGG |
| Lactobacillus jensenii | nGG |
| Lactobacillus rhamnosus | nGAAA |
| Lactobacillus animalis | nnG |
| Lactobacillus casei | nGA |
| Lactobacillus pentosus KCA1 | nnG |
| Lactobacillus gasseri | nTAA |
| Oenococcus kitaharae | nTG |
| Bifidobacterium bombi | nnC |
| Pediococcus parvulus B | nnAAC |
| Pediococcus parvulus A | AGA |
| Lactobacillus cacaonum | nnnAnnA |
| Lactobacillus mali | nnAnAA |
| Lactobacillus buchneri | nnAAAA |

[0157] The predicted secondary structures of the single guide RNAs (sgRNAs) (crRNA-tracrRNA) from Streptococcus species/strains are provided in FIGS. 7-9 and the predicted secondary structures of the sgRNAs from Lactobacillus species/strains are provided in FIG. 10 and FIG. 11. FIG. 7 is an enlargement of the predicted secondary structure of a sgRNA from S. anginosus, in which the crRNA and tracRNA portions of the sgRNA are pointed out. The crRNA and tracRNA portions of each of the sgRNAs provided in FIGS. 7-11 can be similarly identified.

[0158] Upon isolation of the various components of the CRISPR-Cas system from each of the above identified bacteria/archaea, a phylogenetic comparison was done and the relatedness is provided in FIGS. 12-15. Specifically, FIG. 12A provides a phylogenetic tree based on Cas9 protein sequences from various Streptococcus and Lactobacillus species, which shows that the sequences cluster into three families. A consensus sequence and secondary structure of a predicted consensus guide RNA for each family is shown in FIG. 12B. Conservation of the overall sgRNA.crRNA/tracRNA structure is observed between families and high levels of sequence conservation is observed within clusters. The presence of a bulge with a directional kink between the lower stem and the upper stem was observed consistently across a diversity of systems (FIG. 12B). The length of the lower stem was highly conserved within, and variable between families. Interestingly, the highest level of conservation was observed for the nexus sequences (FIG. 12B). The general nexus shape with a GC-rich stem and an offset uracil was shared between the two Streptococcus families. In contrast, the idiosyncratic double stem nexus (FIG. 12B) was unique to, and ubiquitous in, Lactobacillus systems. Remarkably, some bases within the nexus were strictly conserved even between distinct families, including A52 and C55, further highlighting the critical role of this module. Based on the SpyCas9 crystal structure (Nishimashu et al. Cell 156:935-939 (2014)), A52 interacts with the backbone of residues 1103-1107 close to the 5′ end of the target strand, suggesting that the interaction of the nexus with the protein backbone may be required for PAM binding. Furthermore, the structure of SpyCas9 with target DNA shows that this region of the protein directly interacts with the PAM in duplex form, and suggests a role for the nexus in presenting this region of the protein in an appropriate conformation to engage double-stranded DNA.

[0159] The congruence between tracrRNA (left), CRISPR repeat (middle) and Cas9 (right) sequence clustering is provided in FIG. 13, which shows consistent grouping into three families across the three sequence-based phylogenetic trees. FIG. 14 shows a congruence between Cas1 (left), tracrRNA (middle left), CRISPR repeat (middle right) and Cas9 (right) sequence clustering.

[0160] Cas9 polypeptides from the various bacteria and archeae species/strains were also grouped according to their corresponding protospacer adjacent motifs (PAM) (left, FIG. 15). Consensus sequences for the PAM are provided on the right half of FIG. 15.

[0161] Thus, with the knowledge of the specific structures and relatedness of the various nucleotide sequences and polypeptide sequences of the CRISPR-Cas systems as described herein, new and diverse synthetic sgRNAs, chimeric RNAs and protein-RNA complexes can be constructed, which can be used for, for example, specific targeting and cleaving of target DNA, editing of target DNA (e.g., generating altered genotypes), transcriptional control of target genes (repression and activation) and/or DNA labeling. Specifically, chimeric guide RNAs can be constructed from the tracRNA sequences and crRNA sequences in various combinations, swapping out one or more portions of sequences from one (or more) species with portions of sequences from another species, to produce a multitude of different guides functional with one or more Cas9 polypeptide(s) and PAMs, thereby providing increased flexibility and optimization of sgRNA composition and design for different needs.

### Example 2. Predicting Orthogonal Groups

[0162] FIG. 16 shows trees to predict orthogonal groups. Panel A of FIG. 16 provides a Neighbor joining tree from a MUSCLE alignment of the Cas9 protein sequences from 11 organisms of interest. Panel B provides a Neighbor-joining tree from a Clustal alignment of the CRISPR repeat nucleotide sequences from 11 organisms of interest and Panel C provides a Neighbor-joining tree from a MUSCLE alignment of the Cas1 protein sequences from 11 organisms of interest. systems. Panel D provides a Neighbor-joining tree from a Clustal alignment of the repeat-spacer array leader nucleotide sequences from 11 organisms of interest. The groups were used to determine which leader sequences are more closely related and which are more distantly related to determine potential orthogonal systems.

[0163] The groups in Panels A, B, C and D of FIG. 16 were used to determine within each of Cas9 proteins, CRISPR repeat nucleotide sequences, Cas1 proteins and repeat-spacer array leader nucleotide sequences, respectively, which proteins or nucleotide sequences are more closely related and which are more distantly related in order to determine potential orthogonal systems.

[0164] FIG. 17 shows the native tracrRNA:crRNA duplexes that have been combined into single guide RNAs for ease of visualization. Based on the Cas9 proteins, Cas1 proteins, CRIPSR repeats, leader sequences, PAM motifs, guide sequences and structures, the Lactobacillus buchneri and Pediococcus parvulus CRISPR-Cas systems are likely not orthogonal. FIG. 18 shows the native tracrRNA:crRNA duplexes that have been combined into single guide RNAs for ease of visualization. Based on the Cas9 proteins, Cas1 proteins, CRIPSR repeats, leader sequences, PAM motifs, guide sequences and structures, the Lactobacillus jensenii and Lactobacillus gasseri CRISPR-Cas systems are likely not orthogonal. FIG. 19 shows the native tracrRNA:crRNA duplexes that have been combined into single guide RNAs for ease of visualization. Based on the Cas9 proteins, Cas1 proteins, CRIPSR repeats, leader sequences, PAM motifs, guide sequences and structures, the Lactobacillus rhamnosus and Lactobacillus pentosus CRISPR-Cas systems are likely not orthogonal. FIG. 20 shows the native tracrRNA:crRNA duplexes that have been combined into single guide RNAs for ease of visualization. Based on the Cas9 proteins, Cas1 proteins, CRIPSR repeats, leader sequences, PAM motifs, guide sequences and structures, the Lactobacillus animalis CRISPR-Cas systems is likely to be orthogonal to all other systems.

[0165] FIG. 21 shows the native tracrRNA:crRNA duplexes that have been combined into single guide RNAs for ease of visualization. Based on the Cas9 proteins, Cas1 proteins, CRIPSR repeats, leader sequences, PAM motifs, guide sequences and structures, the Lactobacillus cacaonum and Lactobacillus mali CRISPR-Cas systems are likely not orthogonal with each other. FIG. 22 shows the native tracrRNA:crRNA duplexes that have been combined into single guide RNAs for ease of visualization. Based on the Cas9 proteins, Cas1 proteins, CRIPSR repeats, leader sequences, PAM motifs, guide sequences and structures, the Oenococcus kitaharae CRISPR-Cas systems is likely to be orthogonal to all other systems.

[0166] Using a plasmid interference assay activity of the Type II CRISPR-Cas system in Lactobacillus gasseri (Lga) was investigated (see, FIG. 23). Here, a highly expressed spacer sequence from the Lga CRISPR repeat spacer array was identified and used to design plasmids flanked by mutated PAMs to determine activity and flexibility of Cas9-based DNA targeting. Six different mutations of the PAM were tested. Targeting by active Type II CRISPR-Cas systems using Cas9 is shown by a decrease in transformants. If the Cas9 is able to recognize the PAM on the plasmid, the plasmid is cleaved leading to cell death. The Lga Cas9 was able to cause a 3 log reduction in transformants when the optimal PAM was used (Lga2) demonstrating this system is active.

[0167] Using a plasmid interference assay activity of the Type II CRISPR-Cas system in Lactobacillus rhamnosus (Lrh) was also investigated (see, FIG. 24). A highly expressed spacer sequence from the Lrh CRISPR repeat spacer array was identified and used to design plasmids flanked by mutated PAMs to determine activity and flexibility of Cas9-based DNA targeting. Six different mutations of the PAM were tested. Targeting by active Type II CRISPR-Cas systems using Cas9 is shown by a decrease in transformants. If the Cas9 is able to recognize the PAM on the plasmid, the plasmid is cleaved leading to cell death. The Lrh Cas9 was able to cause a 1.5 log reduction in transformants when the optimal PAM was used (Lrh2) demonstrating this system is active.

[0168] Using a plasmid interference assay activity of the Type II CRISPR-Cas system in Lactobacillus pentosus (Lpe) (see, FIG. 25) was investigated. A highly expressed spacer sequence from the Lpe CRISPR repeat spacer array was identified and used to design plasmids flanked by mutated PAMs to determine activity and flexibility of Cas9-based DNA targeting. Six different mutations of the PAM were tested. Targeting by active Type II CRISPR-Cas systems using Cas9 is shown by a decrease in transformants. If the Cas9 is able to recognize the PAM on the plasmid, the plasmid is cleaved leading to cell death. The Lpe Cas9 was able to cause a 2 log reduction in transformants when the optimal PAM was used (Lpe1) demonstrating this system is active.

[0169] In addition, a plasmid interference assay was used to show the activity of the Type II CRISPR-Cas system in Lactobacillus jensenii (Lje) (see, FIG. 26). A highly expressed spacer sequence from the Lje CRISPR repeat spacer array was identified and used to design plasmids flanked by mutated PAMs to determine activity and flexibility of Cas9-based DNA targeting. Six different mutations of the PAM were tested. Targeting by active Type II CRISPR-Cas systems using Cas9 is shown by a decrease in transformants. If the Cas9 is able to recognize the PAM on the plasmid, the plasmid is cleaved leading to cell death. The Lje Cas9 was able to cause a 3 log reduction in transformants when the optimal PAM was used (Lje2, Lje3, Lje7) demonstrating this system is active.

[0170] The activity of the Type II CRISPR-Cas system in Lactobacillus casei (Lcas) was investigated using a plasmid interference assay (see, FIG. 27). A highly expressed spacer sequence from the Lcas CRISPR repeat spacer array was identified and used to design plasmids flanked by mutated PAMs to determine activity and flexibility of Cas9-based DNA targeting. Six different mutations of the PAM were tested. Targeting by active Type II CRISPR-Cas systems using Cas9 is shown by a decrease in transformants. If the Cas9 is able to recognize the PAM on the plasmid, the plasmid is cleaved leading to cell death. The Lcas Cas9 was able to cause a 1 log reduction in transformants when the optimal PAM was used (Lcas4) demonstrating this system is active.

[0171] Finally, Neighbor-joining trees from MUSCLE alignments of the Cas1 protein and of Cas9 protein are provided in Panel A and Panel B of FIG. 28. Please provide any discussion of FIG. 28, Panels A and B that is needed.

[0172] FIG. 28, Panel C is a linear representation of the Cas9 domains as provided by Nishimasu et al. (Cell 156(5):935-49 (2014)) for Spy Cas9. Panel D is a layout of five select CRISPR-Cas loci.

[0173] The above examples clearly illustrate the advantages of the invention. Although the present invention has been described with reference to specific details of certain embodiments thereof, it is not intended that such details should be regarded as limitations upon the scope of the invention except as and to the extent that they are included in the accompanying claims.

1. A protein-RNA complex comprising the following components:
(a) a Cas9 polypeptide comprising an amino acid sequence having at least about 80% identity to the amino acid sequence of any of SEQ ID NOs:194-293, and/or a functional fragment thereof;
(b) a crRNA comprising a 3′ region and a 5′ region, wherein the 3′ region comprises at least about 10 consecutive nucleotides of a Clustered Regularly Interspaced Short Palindromic Repeats (CRISPR) repeat comprising a nucleotide sequence of any one of the nucleotide sequences of SEQ ID NOs:1-98, and/or a functional fragment thereof, and the 5′ region comprises at least about 10 consecutive nucleotides of a spacer sequence located upstream of the repeat; and
(c) a tracRNA comprising a 5′ and 3′ region wherein at least a portion of the 5′ region of the tracRNA is complementary to the 3′ region (CRISPR repeat) of the crRNA.

2. (canceled)

3. The complex of claim 1, wherein the 5′ region of the tracrRNA comprises at least about 10 nucleotides complementary to the at least 10 consecutive nucleotides of the 3′ region of the crRNA.

4. The complex of claim 1, wherein the polypeptide comprises a HNH motif and a RuvC motif.

5. The complex of claim 1, wherein the tracrRNA comprises a nucleotide sequence of any one of the nucleotide sequences of SEQ ID NOs:99-193, and/or a functional fragment thereof.

6. An expression cassette comprising at least one nucleotide sequence comprising or encoding one or more of the components of the protein-RNA complex of claim 1.

7. A vector comprising the expression cassette of claim 6.

8. A cell comprising the protein-RNA complex of claim 1, the expression cassette of claim 6.

9. The cell of claim 8, wherein the cell is a plant cell, bacteria cell, fungal cell, mammalian cell, insect cell, or archaeon cell.

10. A method for site-specific cleavage of a target DNA, comprising:
contacting the target DNA with the protein-RNA complex of claim 1, thereby producing a site specific cleavage of the target DNA in a region defined by complementary binding of the spacer sequence of the crRNA of said complex to the target DNA.

11. (canceled)

12. A method of transcriptional control of a target DNA, comprising:
contacting the target DNA with the protein-RNA complex of claim 1, wherein, the Cas9 polypeptide of the complex is deactivated and the complex binds to the target DNA, thereby controlling the transcription of the target DNA.

13-14. (canceled)

15. A method of editing DNA, comprising:
contacting the target DNA with the protein-RNA complex of claim 1, wherein the complex hinds to the target DNA, thereby editing the target DNA.

16. (canceled)

17. A method for cleaving a double stranded (ds) polynucleotide, comprising contacting said ds polynucleotide with the protein-RNA complex of claim 1, wherein the ds polynucleotide comprises
(a) a protospacer sequence comprising a sequence that is least 80% complementary to the spacer sequence in the crRNA in said complex, and
(b) a protospacer adjacent motif (PAM) comprising a nucleotide sequence of any one of the nucleotide sequences of 5′-NGG-3′, 5′-NGAAA-3′, 5′-NNG-3′, 5′-NGA-3′, 5′-NTAA-3′, 5′-NTG-3′, 5′-NNC-3′, 5′-NNAAC-3′, 5′-AGA-3′, 5′-NNNANNA-3′, 5′-NNANAA-3′, 5′-NNAAAA-3′, and/or 5′-AAAA-3′ downstream from the protospacer sequence, thereby cleaving the polynucleotide in the region defined by complementary binding of the spacer sequence of the crRNA to the polynucleotide.

18. The method of claim 17, wherein the polypeptide of the complex cleaves both strands of the polynucleotide at a cleavage site located 0 to 3 nucleotides upstream of the PAM sequence to create blunt ends.

19-24. (canceled)

25. A method for site-specific nicking of a (+) strand of a double stranded target DNA, comprising contacting a protein-RNA complex with a double stranded target DNA, wherein the complex comprises
(a) a crRNA comprising a 3′ region and a 5′ region, wherein the 3′ region comprises at least about 10 consecutive nucleotides of a CRISPR repeat from a Lactobacillus spp., Bifidobacterium spp., Kandleria spp., Leuconostoc spp., Oenococcus spp, Pediococcus spp., Streptococcus spp., Weissella spp., and/or Olsenella spp., and the 5′ region comprises at least about 10 consecutive nucleotides of a spacer sequence located upstream of the repeat,
(b) a tracRNA comprising a 5′ and 3′ region wherein at least a portion of the 5′ region of the tracRNA is complementary to the 3′ region (CRISPRrepeat) of the crRNA, and
(c) a polypeptide comprising an amino acid sequence of any of SEQ NOs:194-293, or a functional fragment thereof, comprising a point mutation in an RuvC active site motif; and the target DNA comprises a protospacer sequence that is at least about 80% complementary to the spacer sequence in the crRNA and a protospacer adjacent motif (PAM) sequence of any one of the nucleotide sequences of 5′-NGG-3′, 5′-NGAAA-3′, 5′-NNG-3′, 5′-NGA-3′, 5′-NTAA-3′, 5′-NTG-3′, 5′-NNC-3′, 5′-NNAAC-3′, 5′-AGA-3′, 5′-NNNANNA-3′, 5′-NNANAA-3′, 5′-NNAAAA-3′, and/or 5′-AAAA-3′ downstream from the protospacer sequence,
wherein the polypeptide cleaves the (+) strand of the double stranded DNA at a cleavage site located 0 to 3 nucleotides upstream of the PAM sequence, thereby producing a site-specific nick in said double stranded target DNA.

26. A method for site-specific nicking of the (−) strand of a double stranded target DNA, comprising contacting a protein-RNA complex with a double stranded target DNA, wherein the complex comprises
(a) a crRNA comprising a 3′ region and a 5′ region, wherein the 3′ region comprises at least about 10 consecutive nucleotides of a CRISPR repeat comprising the nucleotide sequence from a Lactobacillus spp., Bifidobacterium spp., Kandleria spp., Leuconostoc spp., Oenococcus spp., Pediococcus spp., Streptococcus spp., Weissella spp., and/or Olsenella spp., and the 5′ region comprises at least about 10 consecutive nucleotides of a spacer sequence located upstream of the repeat,
(b) a tracRNA comprising a 5′ and 3′ region wherein at least a portion of the 5′ region of the tracRNA is complementary to the 3′ region (CRISPR repeat) of the crRNA, and
(c) a polypeptide comprising an amino acid sequence of any of SEQ ID Nos:194-293, or a functional fragment thereof, comprising a point mutation in an HNH active site motif; and the target DNA comprises a protospacer sequence that is at least about 80% complementary to the spacer sequence in the crRNA and a protospacer adjacent motif (PAM) sequence comprising a nucleotide sequence of any one of the nucleotide sequences, of 5′-NGG-3′, 5′-NGAAA-3′, 5′-NNG-3′, 5′-NGA-3′, 5′-NTAA-3′, 5′-NTG-3′, 5′-NNC-3′, 5′-NNAAC-3′, 5′-AGA-3′, 5′-NNNANNA-3′, 5′-NNANAA-3′, 5′-NNAAAA-3′, and/or 5′-AAAA-3′ downstream from the proto-spacer sequence,
wherein the polypeptide cleaves the (−) strand of the double stranded DNA at a cleavage site located 0 to 3 nucleotides upstream of the PAM sequence resulting in site-specific nicking of the target DNA.

27-34. (canceled)

35. The method of claim 1, wherein the Cas9 polypeptide is codon optimized for an organism comprising the target DNA.

36. The method of claim 35, wherein the organism is a plant, bacteria, fungus, mammal, insect, or archaeon.

37. The method of claim 36, wherein the organism is Homo sapiens, Drosophila melanogaster, Mus musculus, Rattus norvegicus, Caenorhabditis elegans, or Arabidopsis thaliana.

The application's sequence listing, which the Patent Office published only in electronic form, follows.

SEQUENCE LISTING (388 sequences)

SEQ ID NO: 1 - DNA, 37 bp, Bifidobacterium bombi
ccagtatatcagaggggctttagattgaatttgaaac

SEQ ID NO: 2 - DNA, 36 bp, Bifidobacterium dentium LMG 11045
caagtttatcaagaagggtagaagctaattcccagt

SEQ ID NO: 3 - DNA, 36 bp, Bifidobacterium merycicum LMG 11341
gtttcagatgcctgtcagatcaaggacctagaccac

SEQ ID NO: 4 - DNA, 36 bp, Kandleria vitulina DSM 20405
gttttagagttgtgttattttgaacagatacaaaac

SEQ ID NO: 5 - DNA, 36 bp, Lactobacillus agilis DSM 20509
gtctcagaagtatgttaaatcaatgatgtttagtac

SEQ ID NO: 6 - DNA, 36 bp, Lactobacillus animalis DSM 20602
gttttagagctatgttgttttgtatgactccaaaac

SEQ ID NO: 7 - DNA, 36 bp, Lactobacillus apodemi DSM 16634
gttttagagctatgtagttttgtatgactccaaaac

SEQ ID NO: 8 - DNA, 36 bp, Lactobacillus brevis subsp gravensis ATCC 27305
gctttagtaggatgttaaatcaatgatgttaaaccc

SEQ ID NO: 9 - DNA, 36 bp, Lactobacillus buchneri DSM 20057
gctttagtagtagttcaaaacaatgatgttttatcc

SEQ ID NO: 10 - DNA, 36 bp, Lactobacillus buchneri CD034
gttttagaaggatgttaaatcaataaggttaaaccc

SEQ ID NO: 11 - DNA, 36 bp, Lactobacillus cacaonum DSM 21116
gtttttgtactctcaacattttcctatcagtaaaac

SEQ ID NO: 12 - DNA, 36 bp, Lactobacillus casei str Zhang
gtctcaggtagatgtcgaatcaatcagttcaagagc

SEQ ID NO: 13 - DNA, 36 bp, Lactobacillus ceti DSM 22408
gtttgagaagtgtgttgttctcgataggtcttaaac

SEQ ID NO: 14 - DNA, 36 bp, Lactobacillus coryniformis subsp coryniformis KCTC 3167
gttttagaagagtgttaaatcaatgagtttagaacc

SEQ ID NO: 15 - DNA, 36 bp, Lactobacillus coryniformis torquens
gctattgattccttcagttttcagctaaaatagatc

SEQ ID NO: 16 - DNA, 36 bp, Lactobacillus crispatus FB049-03
gttttagatgattgttagatcaatgaggtttagatc

SEQ ID NO: 17 - DNA, 36 bp, Lactobacillus curvatus CRL 705
gttttagaagagtatcaaatcaatgagtagttcaac

SEQ ID NO: 18 - DNA, 36 bp, Lactobacillus delbrueckii subsp lactis CRL 581
gttttagaaggttgtctattcaataaggtttaaccc

SEQ ID NO: 19 - DNA, 36 bp, Lactobacillus delbrueckii jakobsenii DSM 26046
gggttaaaccttattgaatagacaaccttctaaaac

SEQ ID NO: 20 - DNA, 36 bp, Lactobacillus diolivorans DSM 14421
gttttagaagactgttgaatcaatgatgtttagtcc

SEQ ID NO: 21 - DNA, 36 bp, Lactobacillus farciminis DSM 20184
gttttagaagtatgtctttctatttacttaagaacc

SEQ ID NO: 22 - DNA, 36 bp, Lactobacillus fermentum DSM 20055
gtcttggatgagtgtcagatcagtagttccgagtac

SEQ ID NO: 23 - DNA, 36 bp, Lactobacillus floricola DSM 23037 A
gtttcagaagtatgtcatttgaataatgttaggact

SEQ ID NO: 24 - DNA, 36 bp, Lactobacillus floricola DSM 23037 B
gttttagaagtatgtcaaatcaataaggttaatacc

SEQ ID NO: 25 - DNA, 36 bp, Lactobacillus fuchuensis DSM 14340
gttttagaagagtatcaaatcaatgagttcatcaac

SEQ ID NO: 26 - DNA, 36 bp, Lactobacillus futsaii JCM 17355
gtttttgtaccttaaagaatctagaaatagtaaaac

SEQ ID NO: 27 - DNA, 36 bp, Lactobacillus gasseri K7
gttttagatggttgttagatcaataaggcttagatc

SEQ ID NO: 28 - DNA, 36 bp, Lactobacillus graminis DSM 20719; identical to SEQ ID NO: 17

SEQ ID NO: 29 - DNA, 36 bp, Lactobacillus hammesii DSM 16381
gctttagattagtgacaattcagtaaggtcaagagc

SEQ ID NO: 30 - DNA, 36 bp, Lactobacillus hominis CRBIP
gttttagttagttgttagatcaataaggtttagatc

SEQ ID NO: 31 - DNA, 35 bp, Lactobacillus hordei DSM 19519 A
gttttagaaagacgttaaaccaataatgttagatc

SEQ ID NO: 32 - DNA, 36 bp, Lactobacillus hordei DSM 19519 B; identical to SEQ ID NO: 11

SEQ ID NO: 33 - DNA, 36 bp, Lactobacillus jensenii DSM 20557
gttttagaaggttgttaaatcagtaagttgaaaaac

SEQ ID NO: 34 - DNA, 36 bp, Lactobacillus johnsonii DPC 6026
gttttagatggttgttagatcaataaggtttagatc

SEQ ID NO: 35 - DNA, 36 bp, Lactobacillus lindneri DSM 20690
gttcttaatctcattagaatgacgtacttctaaaac

SEQ ID NO: 36 - DNA, 36 bp, Lactobacillus mali ATCC 27304
gtttttgcactctcaacattttcctatcaataaaac

SEQ ID NO: 37 - DNA, 35 bp, Lactobacillus mindensis DSM 14500
gttttagaagtaagtcatctcaattactaagaacc

SEQ ID NO: 38 - DNA, 36 bp, Lactobacillus mucosae DSM 13345
gctttagatggatgttaaatcaatgatgtaattctc

SEQ ID NO: 39 - DNA, 36 bp, Lactobacillus namurensis DSM 19117
gtttcaaatgagtggtaaatctataaggtcaatacc

SEQ ID NO: 40 - DNA, 36 bp, Lactobacillus nantensis DSM 16982
gtttttgtaccttcaaagatttagaaacagtaaaac

SEQ ID NO: 41 - DNA, 36 bp, Lactobacillus nodensis DSM 19682 A
gttttagtactctcaagaatttagtaacagtaaaac

SEQ ID NO: 42 - DNA, 36 bp, Lactobacillus nodensis DSM 19682 B
gttttagaagtacgtcatttcatgtagttaagaacc

SEQ ID NO: 43 - DNA, 36 bp, Lactobacillus oligofermentans DSM 15707
gttttagaagagtatcaaatcaatgagttcgagacc

SEQ ID NO: 44 - DNA, 36 bp, Lactobacillus otakiensis DSM 19908; identical to SEQ ID NO: 10

SEQ ID NO: 45 - DNA, 36 bp, Lactobacillus ozensis DSM 23829
gttattaatacattacaaatacatagatgttataat

SEQ ID NO: 46 - DNA, 36 bp, Lactobacillus paracasei subsp paracasei 8700:2; identical to SEQ ID NO: 12

SEQ ID NO: 47 - DNA, 36 bp, Lactobacillus paracasei subsp tolerans Lpl7; identical to SEQ ID NO: 12

SEQ ID NO: 48 - DNA, 36 bp, Lactobacillus paracollinoides DSM 15502
gttttagatgaatatcaaatcaatgaggttcaaagc

SEQ ID NO: 49 - DNA, 36 bp, Lactobacillus parakefiri DSM 10551; identical to SEQ ID NO: 10

SEQ ID NO: 50 - DNA, 36 bp, Lactobacillus pentosus IG1
gtttcagaaggacattaaatcaataaggtcaagacc

SEQ ID NO: 51 - DNA, 36 bp, Lactobacillus pentosus KCA1
gtcttgaatagtagtcatatcaaacaggtttagaac

SEQ ID NO: 52 - DNA, 36 bp, Lactobacillus plantarum EGD-AQ4; identical to SEQ ID NO: 51

SEQ ID NO: 53 - DNA, 36 bp, Lactobacillus psittaci DSM 15354; identical to SEQ ID NO: 33

SEQ ID NO: 54 - DNA, 36 bp, Lactobacillus rennini DSM 20253
gttttagaagagtatcaaatcaatgagtttatcaac

SEQ ID NO: 55 - DNA, 36 bp, Lactobacillus reuteri mlc3
gttttagatgtacttcaaatcaataatgtttagaac

SEQ ID NO: 56 - DNA, 36 bp, Lactobacillus rhamnosus GG
gtctcaggtagatgtcagatcaatcagttcaagagc

SEQ ID NO: 57 - DNA, 36 bp, Lactobacillus rossiae DSM 15914
gttttagatgtatgtcagatcaatagggttaagaac

SEQ ID NO: 58 - DNA, 36 bp, Lactobacillus ruminis ATCC 25644
gtttcagctggatgtcatatcaatgatgttatgaac

SEQ ID NO: 59 - DNA, 36 bp, Lactobacillus sakei carnosus DSM 15831; identical to SEQ ID NO: 17

SEQ ID NO: 60 - DNA, 36 bp, Lactobacillus salivarius UCC 118
gtttcagaagtatgttaaatcaataaggttaagacc

SEQ ID NO: 61 - DNA, 36 bp, Lactobacillus sanfranciscensis DSM 20451
gttttagaagtacgtcattctaatgagattaagagc

SEQ ID NO: 62 - DNA, 36 bp, Lactobacillus saniviri DSM 24301
gttttagttggatgtcagatcaaataggttaagcac

SEQ ID NO: 63 - DNA, 36 bp, Lactobacillus senmaizukei DSM 21775
gttttagttcagtgacaaatcaatagagttaagaac

SEQ ID NO: 64 - DNA, 36 bp, Lactobacillus tucceti DSM 20183
gtttttgtactcttaaggatttagtaatagtaaaac

SEQ ID NO: 65 - DNA, 36 bp, Lactobacillus versmoldensis DSM 14857
gttttagatctaagtcatctcaattacttaagaacc

SEQ ID NO: 66 - DNA, 36 bp, Lactobacillus zymae DSM 19395
gttttagatgagtggtaaatctagaaggtcaaaagc

SEQ ID NO: 67 - DNA, 36 bp, Leuconostoc gelidum JB7
gcttcagatgtgtgtcagatcaatgaggtttaaacc

SEQ ID NO: 68 - DNA, 36 bp, Leuconostoc pseudomesenteroides 4882
gtataaagccccattgatctgacatacatctgaagc

SEQ ID NO: 69 - DNA, 36 bp, Oenococcus kitaharae DSM 17330
gcttcagatgtgtgtcagatcaatgaggtagaaccc

SEQ ID NO: 70 - DNA, 36 bp, Pediococcus inopinatus DSM 20285
gttttagaagagtgtcgaatcaatatagttaagatc

SEQ ID NO: 71 - DNA, 36 bp, Pediococcus lolii DSM 19927
gtttcagaaggatgttaaatcaataaggttaagatc

SEQ ID NO: 72 - DNA, 36 bp, Pediococcus parvulus DSM 20332 A; identical to SEQ ID NO: 71

SEQ ID NO: 73 - DNA, 36 bp, Pediococcus parvulus DSM 20332B
gttttagaagagtgtcgaatcaatatagttaagagc

SEQ ID NO: 74 - DNA, 36 bp, Pediococcus stilesii DSM 18001
gtttcagagggatgttaaagaagtaggttcaatatc

SEQ ID NO: 75 - DNA, 36 bp, Steptococcus agalactiae GB00300
gttttagagctgtgctgtttcgaatggttccaaaac

SEQ ID NO: 76 - DNA, 36 bp, Steptococcus gallolyticus ATCC BAA-2069; identical to SEQ ID NO: 75

SEQ ID NO: 77 - DNA, 36 bp, Steptococcus henryi DSM 19005
gtttttgtactctcaagatttaagtaactgtaaaac

SEQ ID NO: 78 - DNA, 36 bp, Steptococcus mutans NLML5
gtttttgtactctcaagatttaagtaactgtacaac

SEQ ID NO: 79 - DNA, 36 bp, Steptococcus oralis SK304
gttttagagctgtgttgtttcgaatggttccaaaac

SEQ ID NO: 80 - DNA, 36 bp, Streptococcus anginosus 1_2_62CV; identical to SEQ ID NO: 77

SEQ ID NO: 81 - DNA, 36 bp, Streptococcus anginosus DSM 20563; identical to SEQ ID NO: 75

SEQ ID NO: 82 - DNA, 36 bp, Streptococcus dysagalactiae subsp equisimilis
gttttagagctatgttgttttgaatggtcccaaaac

SEQ ID NO: 83 - DNA, 36 bp, Streptococcus equi subsp zooepidemicus
gttttagagttatgctgtattgaatggttccaaaac

SEQ ID NO: 84 - DNA, 36 bp, Streptococcus gordonii Challis substr CH1; identical to SEQ ID NO: 78

SEQ ID NO: 85 - DNA, 36 bp, Streptococcus infantarius subsp infantarius
gtttttgtactctcaagatttaagtaaccgtaaaac

SEQ ID NO: 86 - DNA, 36 bp, Streptococcus intermedius B196
gtttttgtactctcaagatttaagtaactgcaaaac

SEQ ID NO: 87 - DNA, 36 bp, Streptococcus lutetiensis 033; identical to SEQ ID NO: 79

SEQ ID NO: 88 - DNA, 36 bp, Streptococcus mitis SK321; identical to SEQ ID NO: 79

SEQ ID NO: 89 - DNA, 36 bp, Streptococcus mutans TA 159; identical to SEQ ID NO: 79

SEQ ID NO: 90 - DNA, 36 bp, Streptococcus orisratti DSM 15617; identical to SEQ ID NO: 77

SEQ ID NO: 91 - DNA, 36 bp, Streptococcus parasanguinis F0449; identical to SEQ ID NO: 86

SEQ ID NO: 92 - DNA, 36 bp, Streptococcus salivarius K12; identical to SEQ ID NO: 79

SEQ ID NO: 93 - DNA, 36 bp, Streptococcus sanguinis SK330; identical to SEQ ID NO: 79

SEQ ID NO: 94 - DNA, 36 bp, Streptococcus vestibularis ATCC 49124; identical to SEQ ID NO: 78

SEQ ID NO: 95 - DNA, 36 bp, Lactobacillus composti DSM 18527
gttctggaagtatgtcagatcaatggattcaagagc

SEQ ID NO: 96 - DNA, 36 bp, Lactobacillus concavus DSM 17758
gttttagaagagtgtcatttcaataaggttaagatc

SEQ ID NO: 97 - DNA, 36 bp, Weissella halotolerans DSM 20190
gctttagatgtatgtcagattaatggggtttattcc

SEQ ID NO: 98 - DNA, 36 bp, Weissella kandleri DSM 20593
gcttcatatctctgtcaaattaatgagttgtttagc

SEQ ID NO: 99 - DNA, 136 bp, Bifidobacterium dentium LMG 11045
tggctttatcaagaatggtgagaccagtccgatggtggatgaggatctgctctttttcattacgaaatccataaaaaggaatgacatcatgcaattcaacatatccatagctgtattgcatgatgtcattcctttt

SEQ ID NO: 100 - DNA, 129 bp, Bifidobacterium merycicum LMG 11341
ggtgtctaggtccttgacctgataggcatatattgaaataaagcaagacccttgggtcaagcttcagaaggttttagacctggccttatggccatggggctcccggcagcgccgggagcccctctttct

SEQ ID NO: 101 - DNA, 109 bp, Kandleria vitulina DSM 20405
agttttggtctgttcaaaataacacaacgagttaaaataaagcttatgcttaaatgctggttatccagttgtcatttagatgacgtgcatcacttcggtgatgcttttt

SEQ ID NO: 102 - DNA, 126 bp, Lactobacillus agilis DSM 20509
catctaaacattattgatttaacatactgtgttgagatcaaacggagctttttagcgatgtttatccttttgagccattatatggccatacatattataaaaagtgcccctaaaagggcacttttt

SEQ ID NO: 103 - DNA, 104 bp, Lactobacillus animalis DSM 20602
ctagtggagttatacaaaacaacattagcgaagttaaaataaggtttaatccgtaatcaacaagttttatcttgcgcgcgccgtttcggcgctttttttgtttt

SEQ ID NO: 104 - DNA, 88 bp, Lactobacillus apodemi DSM 16634
tacgtggagtcatacaaagccacatagcaagttaaaataaggttttatccgtaatcaatcatgggcgctgtttcggcgcctatttttt

SEQ ID NO: 105 - DNA, 103 bp, Lactobacillus brevis subsp gravensis ATCC 27305
cctgtttaacatcattgatttaacatcctggtttaaagtcaaacaaggcagtaatgccaagttcttacttatgactcacgtatgtgagcatacatataaaaaa

SEQ ID NO: 106 - DNA, 102 bp, Lactobacillus buchneri DSM 20057
cggatagacatcattgttttgaactactggtttaaagtcaaacaaggtagcaataccaagttcttacttatgacccatttatatgggcatacatacaataaa

SEQ ID NO: 107 - DNA, 139 bp, Lactobacillus buchneri CD034
atgtttgaccttattgatttaacatcctgtgttaaaatcaagcaaagcgctttgcgcggagtttcaacttttgacccattatatgggcattacataagcgaaaggaaccattcttcagttggagaatggttcctttttt

SEQ ID NO: 108 - DNA, 81 bp, Lactobacillus cacaonum DSM 21116
gttttattgataggaaaatgattgagaatctacaaagataaggctttatgccgaaatgactgcctttatggcagttttttt

SEQ ID NO: 109 - DNA, 109 bp, Lactobacillus casei str Zhang
cgttttgaactgattgattcgacatctacacgttgagatcaaacaaagcctcggctgagtttcaatttctgagcccatgttgggccatacataccgccatccgggaaaa

SEQ ID NO: 110 - DNA, 102 bp, Lactobacillus ceti DSM 22408
gttttaagacctatcgagaacaacacacttaagttcaaataaaaatttattctattgaccagaaatggcagcccgctgtgggcattttaacttcattttttt

SEQ ID NO: 111 - DNA, 113 bp, Lactobacillus coryniformis subsp coryniformis KCTC 3167
ctatctaaacttattgatttaacactctgagttaaaatcaaacaaggcgtaagccaagtttcatcttgtgagtccctatggaccataaaggcgctattgatcttcgtgatcaa

SEQ ID NO: 112 - DNA, 112 bp, Lactobacillus crispatus FB049-03
actcttaaccttattgatctaacaatcataatttaaaatcaagcaatgcgttttagtacgcagagtttcaacacttgtcccgagctatcgagggactttttttatgtaaaaa

SEQ ID NO: 113 - DNA, 113 bp, Lactobacillus curvatus CRL 705
atcgaaatactcattgatttgatactctgagttaaaatcaaacaaggtcttcggaccaagttttctattctaagcctcttatgaggcctttttttatgccttcaaaccaaaaa

SEQ ID NO: 114 - DNA, 109 bp, Lactobacillus delbrueckii subsp lactis CRL 581
acgtttgaccttattgaatagacaacctgatttaaaatcaagcaaagctcttcggagcggagtttatacatttgtcccgtgtattgcgggctttttttatgcaacaaaa

SEQ ID NO: 115 - DNA, 97 bp, Lactobacillus delbrueckii jakobsenii DSM 26046
acgttagaccttattgaatagacaacctgatttaaaatcaagcaaagctcttcggagtggagtttatacatttgtcccgcgtattgcgggctttttt

SEQ ID NO: 116 - DNA, 97 bp, Lactobacillus diolivorans DSM 14421
tgggatgtcattgtctgaatcaatgattgaaaaatataacgctcaccgtgatcacttgaagctactcaaacagctcgaggataagattgacgatccg

SEQ ID NO: 117 - DNA, 102 bp, Lactobacillus farciminis DSM 20184
ggttcgtaagtaaatagaaagacatacttagattaaaataaacaataatgttaaatggtcgtaaggctgctcccgcgtgggggctttttttttgcctttttt

SEQ ID NO: 118 - DNA, 106 bp, Lactobacillus fermentum DSM 20055
acattcgagactactgatctaacactcatagtcaagatcaaacgagtggttttccacgagttattacttttgagccatgttattctggccatacatataataaaaa

SEQ ID NO: 119 - DNA, 120 bp, Lactobacillus floricola DSM 23037 A
gttcttaacattattcaaatgacatactgagttgaaatcaaacaaggatttattccaagttttatattttgaacctctttttgaggtcagacctctttcttaattgaaagaggttttttt

SEQ ID NO: 120 - DNA, 125 bp, Lactobacillus floricola DSM 23037 B
ttcattaaccttattgatttgacatactgagttaaaataaaacaatgcgtaagcaaagtttacacttattagccatttatagttggcaatacataaagaaagacctaggtcatatgacctaggtc

SEQ ID NO: 121 - DNA, 106 bp, Lactobacillus fuchuensis DSM 14340
accgataaactcattgatttgatactctgggttaaaatcaaacgaaaccttcgggttaagtttttacttctgagcctcgtatgaggcctttttttatgccttcatt

SEQ ID NO: 122 - DNA, 90 bp, Lactobacillus futsaii JCM 17355
gttttactatttctagattctttaagatctacaaaaataaggatttattccgaatttaccacctattttaattaataggtggtttttttt

SEQ ID NO: 123 - DNA, 112 bp, Lactobacillus gasseri K7
acactaaactttattgatctaacaaccagatttaaaatcaagcaatgcatcttttgatgcaaagtttcaatacttgtcccgagctatcgagggactttttttatgcaaaaaa

SEQ ID NO: 124 - DNA, 92 bp, Lactobacillus graminis DSM 20719
gaaatactcattgatttgatactctgagttaaaatcaaacaaggtctttggaccaagttttctattctgagcctcttatgaggccttttttt

SEQ ID NO: 125 - DNA, 138 bp, Lactobacillus hammesii DSM 16381
ccgcttgatcttactgaattgtcactaagagttaaagtcagacaaggtggtttaccaccaagttttatcttatgagcccgttatcgagccatacatatcttgttagagtcctttgctgaatgcgtcagcgaaggactc

SEQ ID NO: 126 - DNA, 112 bp, Lactobacillus hominis CRBIP
actctaaactttattgatctaacaaccagatttaaaatcaagcaatgcatcttttgatgcaaagtttcaacacttgtcccgagctatcgagggactttttttatacaaaaaa

SEQ ID NO: 127 - DNA, 141 bp, Lactobacillus hordei DSM 19519 A
ggattaacattattggtttaacgtcttgttttaaaatcaaacaaaacactttagtgttgagttttaacttttgacccactttattagtgggcagtacataaaaaaggaatcactcttataatgaggagtgattcctttttt

SEQ ID NO: 128 - DNA, 83 bp, Lactobacillus hordei DSM 19519 B
gttttgttgataggaaaatgattgagaatctacaaagataaggctttatgccgaaattactgcctttttggcagttttttttt

SEQ ID NO: 129 - DNA, 115 bp, Lactobacillus jensenii DSM 20557
acatttcaatttactgatttaacaaccttatttttaaaatcaagcaaggctttcgggccgagttttcacatgtgtaccgcttatagcggtctttttttttgcagtaaataaaaaa

SEQ ID NO: 130 - DNA, 112 bp, Lactobacillus johnsonii DPC 6026
catctaaactttattgatctaacaaccagatttaaaatcaagcaatgcatcttttgatgcaaagtttcaatatttgtcccacgttatcgagggactttttttatacaaaaaa

SEQ ID NO: 131 - DNA, 94 bp, Lactobacillus lindneri DSM 20690
cattttaatctcattagaatgacgtactgagttaaaatcaaacaaagccttatgctgagttttatcttttgagcccttaagggccatacatata

SEQ ID NO: 132 - DNA, 82 bp, Lactobacillus mali ATCC 27304
gttttattgataggaaaatgattgagaatctgcaaagataaggctttatgccgaaattactgcctcttaggcagtttttttt

SEQ ID NO: 133 - DNA, 92 bp, Lactobacillus mindensis DSM 14500
gctcttaagtaattgagatgacttactgagttaaaataaacattaaagttaaatgaccttctggtcggctcccgcgtgggggctattttttt

SEQ ID NO: 134 - DNA, 104 bp, Lactobacillus mucosae DSM 13345
aggaataacatcattgatttaacatccagagttaaagtcaaacaatgcattctgcaaagttatttcttctgacccatttattaatgggcaatacatattaaaaa

SEQ ID NO: 135 - DNA, 140 bp, Lactobacillus namurensis DSM 19117
ctgtttgaccttatagatttaccactcagagttgaaatcaaacaagatgctttagcatcaagtttcccattgtgagcccgttatcggtgccatacatattaaaacgaccaagccaccttttcgtgacttggtcgtttttt

SEQ ID NO: 136 - DNA, 90 bp, Lactobacillus nantensis DSM 16982
gttttactgtttctaaatctttgaagatctacaaaaataaggatttattccgaatttaccacctattttaaaaaataggtggtttttttt

SEQ ID NO: 137 - DNA, 96 bp, Lactobacillus nodensis DSM 19682 A
gttttactgttactaaattcttgagaacctactaaaataaggatttattccgaatttaccacctattttttaataggtggtttttttttacaaaaa

SEQ ID NO: 138 - DNA, 96 bp, Lactobacillus nodensis DSM 19682 B
ttgttcaaactacatgaaatgacgtactgagttaaaatcaacatttatgttaaatagtctcaattgactggctcccgcgtgggggctatttttttt

SEQ ID NO: 139 - DNA, 136 bp, Lactobacillus oligofermentans DSM 15707
cacatcgaattcattgatttgatactctgagttaaaatcaagcaaggcgcaagccaagtttaatcttctgagtcctgtatgggaccatacataaagagcgttattgatttcattatcaataacgctctattttatt

SEQ ID NO: 140 - DNA, 140 bp, Lactobacillus otakiensis DSM 19908
atgtttgaccttattgatttaacatcctgtgttaaaatcaagcaatgcgctttgcgcggagtttccacttttgacccattatatgggcattacataagctaaaggaaccattcttcgatttggagaatggttcctttttt

SEQ ID NO: 141 - DNA, 110 bp, Lactobacillus ozensis DSM 23829
attataacatctatgtatttgaaatgtattaatgcatcaaaatcttagatcacaatttctataatatacgtaaaacagcaaattttactttataagaatttttatatttt

SEQ ID NO: 142 - DNA, 109 bp, Lactobacillus paracasei subsp paracasei 8700:2; identical to SEQ ID NO: 109

SEQ ID NO: 143 - DNA, 108 bp, Lactobacillus paracasei subsp tolerans Lpl7
cgttttgaactgattgattcgacatctacacgttgagatcaaacaaagcttcggctgagtttcaatttttgagcccatgttgggccatacatacgccatccgggaaaa

SEQ ID NO: 144 - DNA, 69 bp, Lactobacillus paracollinoides DSM 15502
acttaataacctcattgatttgatattcagagttaaaatcaaacaaggcttatgccaagttttctcttt

SEQ ID NO: 145 - DNA, 140 bp, Lactobacillus parakefiri DSM 10551
atgtttgaccttattgatttaacatcctgtgttaaaatcaagcaatgcgctttgcgcggagtttccacttttgacccattatatgggcattacataagcgaaaggaaccattcttcgatttggagaatggttcctttttt

SEQ ID NO: 146 - DNA, 109 bp, Lactobacillus pentosus IG1
acacttgaccttattgatttaatgtcctttatttgaaatcaaacaacaccattcatggtgaagttttcacacctgtccatcctatatatatggacacctacataaaaaa

SEQ ID NO: 147 - DNA, 117 bp, Lactobacillus pentosus KCA1
gttctaaaccttcttgatatgactactagcgtcaagatcaaacaaggcattttgccgagtttcaccttttgagtccgtattcggaccattacatatgtatcaagatgtcgcccattt

SEQ ID NO: 148 - DNA, 103 bp, Lactobacillus plantarum EGD-AQ4
gttctaaaccttcttgatatgactactagcgtcaagatcaaacaaggcattttgccgagtttcaccttttgagtccgtattcggaccattacatatgtatcaa

SEQ ID NO: 149 - DNA, 106 bp, Lactobacillus psittaci DSM 15354
acaatctcaacatttcaatttactgatttaacaacctgatttaaaatcaagcaaggtcttcggaccgagttttcacatttgtaccgcttatagcggtctttttttt

SEQ ID NO: 150 - DNA, 93 bp, Lactobacillus rennini DSM 20253
attgaaagattcattgatttgatactctgagttaaaatcaaacaaaccttcgggtgagtttttacttctgagcctcgtatggggccttttttt

SEQ ID NO: 151 - DNA, 109 bp, Lactobacillus reuteri mlc3
ctactaaatattattgatttgaagtacagagttaaaatcaaacaagtgcttcagcacaagtttctacttttgagtcagttatctgaccaatacataaaagggaattaaa

SEQ ID NO: 152 - DNA, 110 bp, Lactobacillus rhamnosus GG
caacttgaattgattgatctgacatctacgagttgagatcaaacaaagcttcagctgagtttcaatttctgagcccatgttgggccatacatatgccacccgagtgcaaa

SEQ ID NO: 153 - DNA, 110 bp, Lactobacillus rhamnosus GG; identical to SEQ ID NO: 152

SEQ ID NO: 154 - DNA, 143 bp, Lactobacillus rossiae DSM 15814
acttttgaccctattgatctgacatacagcgttaaaatcaagcaaggctttcgagccaagtttaaatctttgggttcgctattcggaccgtacatagtaaaagggcgtcatcgagttcaaattcgatggcgccctttagtttt

SEQ ID NO: 155 - DNA, 103 bp, Lactobacillus ruminis ATCC 25644
acgtaaaacatcattgatatgacatccagaagttgaaatcaagcaagacttaaagtcaagcttctacttttgattcacgttttgtggacagtacatattgaca

SEQ ID NO: 156 - DNA, 95 bp, Lactobacillus sakei carnosus DSM 15831
accgaaatactcattgatttgatactctgagttaaaatcaaacaaggtcttttgaccaagttttctattctgagcctcttatgaggccttttttt

SEQ ID NO: 157 - DNA, 119 bp, Lactobacillus salivarius UCC 118
ggttttgacctcattgatttaacattctgagttgaaatcaaacaaggcttttatagctgagtttttctttttgatccatatatatggactatacataaaaaggagtcatctgactcctt

SEQ ID NO: 158 - DNA, 99 bp, Lactobacillus sanfranciscensis DSM 20451
attttaatctcattagaatgacgtactgagttaaaatcaaacaaggtcttgtgccaagttttatcttctgagcccttaagggccatacatataagaaaa

SEQ ID NO: 159 - DNA, 128 bp, Lactobacillus saniviri DSM 24301
acgtttaacctatttgatctgacattcaaggttaaaatcaaacaaggcttcggccaagttttattcttagggctcgctatcgagccatacataaaaacacacccgtttcggcgggtgtgttttctttt

SEQ ID NO: 160 - DNA, 129 bp, Lactobacillus senmaizukei DSM 21775
acgcttgactctattgatttgtcactgaaagttaaaatcaagcaaggccttgtgccaagttttactttttgagcccggtatcgagccatacatagtcggcccttccagtcatgtggaagggccgttttt

SEQ ID NO: 161 - DNA, 86 bp, Lactobacillus tucceti DSM 20183
gttttactattactaaattcttaaggatctacaaaaataaggatttattccgaatttaccacctacttgttaggtggttttttttt

SEQ ID NO: 162 - DNA, 167 bp, Lactobacillus versmoldensis DSM 14857
atgttctaagtaattgagatgacttagagaattaaaatcaacattaaagtaaatcgatcattttgattgggcccaatggggcctatttttttgctctgaatttttagtcgatatgtttaattgatttaaataatccggttggtgattcataaataaaatcagttttt

SEQ ID NO: 163 - DNA, 143 bp, Lactobacillus zymae DSM 19395
ctgcttgaccttctagatttaccactcagtgttaaaatcaaacaagatactgcggtatcaagttttcctttttgagctcgttatcgagccaatacataattaaacgaccaactcactggcagtccaatgagttggtcattttt

SEQ ID NO: 164 - DNA, 140 bp, Leuconostoc gelidum JB7
ggtttaacctcattgatctgatacacaatattgaagtaacgcaaggctttatgccaagcttaattactcatcaagagtggccttatggccgtacataaaatcccgtgttgttacaaaacagcacgggatttctttttatt

SEQ ID NO: 165 - DNA, 145 bp, Leuconostoc pseudomesenteroides 4882
gtatagaaaccattgatctgacatacaaagttgaagtaacgcaaggcgtcagccaagcttattgactctttacgagtggccctatggccgtacataaaatcccgtgttgcctttgcaacacgggatttatctttattcatccttt

SEQ ID NO: 166 - DNA, 143 bp, Oenococcus kitaharae DSM 17330
gggttctacctcattgatctgacacacagcattgaagtaaagcaagattaatttcaagcttaattttcttcacattttatgtgcagaagggcttatgcccacaatacataaaaagtccgcattcacttgcggacttttatttt

SEQ ID NO: 167 - DNA, 143 bp, Pediococcus inopinatus DSM 20285
tattttaactatattgatttgacgctctgagttaaaatcaaacaaagcttcggctgagttttatcttttgaggccgctatcggcccatacatattttattcaagaaaagctattgacggttatcaaaccaccaatagcttttt

SEQ ID NO: 168 - DNA, 140 bp, Pediococcus lolii DSM 19927
acttttaaccttattgatttaacatcctgatttgaaatcaaacaatgcactttgtgcggagtttatccatttgtcccagctatctgggcaatacatagtgaaagaggaaccgacccttaatgggacggctcctctttttt

SEQ ID NO: 169 - DNA, 140 bp, Pediococcus parvulus DSM 20332 A; identical to SEQ ID NO: 168

SEQ ID NO: 170 - DNA, 149 bp, Pediococcus parvulus DSM 20332 B
tattttaactatattgatttgacgctctgggttaaaatcaaacaaagctttatgctgagttttatcttttgagtccgctatcggaccatacataattttattaagaaaagctattgaaggttattaaaccgacaatagcttttcttttt

SEQ ID NO: 171 - DNA, 137 bp, Pediococcus stilesii DSM 18001
acaattgaatttacttctttaacatcctaatttgaaatcaagcaatgcacttcggtgcggagtttacacatttgtcgtctttataggcgcgtacataaagaaaagaggaacgttccttaatggaagttcctcttttt

SEQ ID NO: 172 - DNA, 119 bp, Steptococcus agalactiae GB00300
ttgttggaactattcgaaacagcacagcgcgttaaaataaggcagtgattttttaatccagtccgtattcagcttgaaaaagtgagcaccgattcggtgcttttttttatgtcattgtt

SEQ ID NO: 173 - DNA, 119 bp, Steptococcus gallolyticus ATCC BAA-2069
ttgttggagctattcgaaacaacacagcgagttaaaataaggctttgtccgtacacaacttgtaaaagtggcacccgattcgggtgcgtttttttgtgcccttacaaataatttcaaca

SEQ ID NO: 174 - DNA, 102 bp, Steptococcus henryi DSM 19005
cttgcacagttacttaaatcttgctgagcctacaaagataaggcttcatgccgaaatcaagcacccccgtttttaacgaggggtgcttttcgttatgtaaaa

SEQ ID NO: 175 - DNA, 110 bp, Steptococcus mutans NLML5
cttacacagttacttaaatcttgcagaagctacaaagataaggcttcatgccgaaatcaacaccctatctattataagatagggtgttttcgttttatagaggagatttt

SEQ ID NO: 176 - DNA, 119 bp, Steptococcus oralis SK304
ttgttggaactattcgaaacaacacagcaagttaaaataaggctttgtccgtacacaacttgaaaaagtgcgcaccgattcggtgctttttattttattatactaactcattgtactcc

SEQ ID NO: 177 - DNA, 105 bp, Streptococcus anginosus 1_2_62CV
cttacacagttacttaaatcttgcagaagctacaaagataaggcttcatgccgaaatcaacaccctgtctatgacggggtgttttcgtgttgtaaaggagttttt

SEQ ID NO: 178 - DNA, 119 bp, Streptococcus anginosus DSM 20563
atgttggaatcattcgaaacaacacagcaagttaaaataaggctttgtccgtactcaacttaaaaagtgcgcaccgattcggtgcttttttatttcaatcaagaacacaaaaaaacagc

SEQ ID NO: 179 - DNA, 119 bp, Streptococcus dysagalactiae subsp equisimilis
ttgttggaaccattcaaaacaacgtagcaagttaaaataaggctagtccgttatcaacttgaaaaagtggcaccgagtcggtgctttttgtatctttattttaccttgtcaataaacta

SEQ ID NO: 180 - DNA, 119 bp, Streptococcus equi subsp zooepidemicus
cctatggaactattcaatacagcatagcaaagttaaaataaggctttgtccgtaatcaacctgaaaaggggagcaccgaatcggtgcttttttactttctaccaactctaccaatactt

SEQ ID NO: 181 - DNA, 99 bp, Streptococcus gordonii Challis substr CH1
cttacacagttacttaaatcttgcagaagctacaaagataaggcttcatgccgaattcaacaccctgtcatttatggcggggtgttttcgatttgtaaa

SEQ ID NO: 182 - DNA, 109 bp, Streptococcus infantarius subsp infantarius
cttgcacggttacttaaatcttgcagagcctacaaagataaggcttcatgccgaattcaagcaccccatgtttacatggggtgcttttcgttgtgtaaaaaggagagta

SEQ ID NO: 183 - DNA, 106 bp, Streptococcus intermedius B196
cttacacagttacttaaatcttgcagaagctacaaagataaggcttcatgccgaaatcaacaccctgtctatgacggggtgttttcgtgttgtaaaggagttttta

SEQ ID NO: 184 - DNA, 119 bp, Streptococcus lutetiensis 033
ttgttggaactattcgaaacaacacagtgagttaaaataaggctttgtccgtacacaacttataaaagtggcacccgattcggatgcattttttatttgtgattcaaatagatataaca

SEQ ID NO: 185 - DNA, 119 bp, Streptococcus mitis SK321
tcgttggaactattcgaaacaacacagcaaagttaaaataaggctttgtccgtacacaacttgaaaaagtgcgcaccgattcggtgcttttttgttttactatactaatttattctact

SEQ ID NO: 186 - DNA, 119 bp, Streptococcus mutans TA 159
gtgttggaatcattcgaaacaacacagcaagttaaaataaggcagtgatttttaatccagtccgtacacaacttgaaaaagtgcgcaccgattcggtgcttttttatttgctttactgt

SEQ ID NO: 187 - DNA, 100 bp, Streptococcus orisratti DSM 15617
cttgcacagttacttaaatcttgcagagcctacaaagataaggctttatgccgaaatcaagcaccccgtttatacgaggtgcttttcgttttaaataaaa

SEQ ID NO: 188 - DNA, 99 bp, Streptococcus parasanguinis F0449
cttacacagttacttaaatcttgcagaagctacaaagataaggcttcatgccgaattcaacaccctgtcatttatggcggggtgttttcgttttgtaaa

SEQ ID NO: 189 - DNA, 119 bp, Streptococcus salivarius K12
ggtttgaaaccattcgaaacaatacagcaaagttaaaataaggcttagtccgtattcaacttgagaaagtggcaccgattcggtgcttttttgctgcacaaagagtcccttggaattat

SEQ ID NO: 190 - DNA, 119 bp, Streptococcus sanguinis SK330
ttgttggaactattcgaaacaacacagcaagttaaaataaggctttgtccgtacacaacttgaaaaagtgcgcaccgattcggtgcttttttaattactacaggtgcttttttaattac

SEQ ID NO: 191 - DNA, 102 bp, Streptococcus vestibularis ATCC 49124
cttacacagttacttaaatcttgcagaagctacaaagataaggcttcatgccgaaatcaacaccctgtcattttatggcagggtgttttcgttatttaaaaa

SEQ ID NO: 192 - DNA, 98 bp, Lactobacillus composti DSM 18527
aatcttgaatctattgatctgacatacagcgtcagaataaaacaaggccatcggccaagtttacagcgctctttttgagagtggggcttatgcccata

SEQ ID NO: 193 - DNA, 67 bp, Lactobacillus concavus DSM 17758
tatcttaactttattgaaatgacactctgttaaaatcaaacaaggcttcggccaagttttccctttt

SEQ ID NO: 194 - protein, 1239 aa, Bifidobacterium bombi
MSQHRRYRIGIDVGLNSVGLAAVEIDANHDNPLDEIPISILNAQSVIHDGGVDPDEAKSATSRRASAGVARRTRRLHKSKRQRLAKLDEVLNELGYPVEDESQFPAGSNPYIAWQVRAKLAETFIPDVETRKRMISIAIRHIARHRGWRNPYSSVADAERMSHTPSPFMVEYAKKLDFEINDRRTNGFYHSPWQSVDEEGKRLSKSELEKQPKIEDWNDNPINGKTIAQLVVSSLEPQTKIRRDLTHGLQTESTLNIQTEKLHQSDYIHELETIFERQHVDQTTQEQLLEATFHTKNPKAVGAAAKLVGKDALDSRYYRASRATPAFEEYRVMAAIDTLRIREHGTERQLTTDERRKLFDFIKGLPSKKTKNEPSISSLTWGDVADFLGIQRIDLRGLGSLKDGEPVSAKQPPVIETNDIMQKAPDPIAAWWSQANTKERDRFVEFMSNAGAIKDTSDEVRNIDAEISQLLEELTGSELESLDKITLTSGRAAYSSQTLRNITNYMYETGCDLTTARQELYHVGKNWAPPAPPIYEHTGNPSVDRTFSIIHRWLCNMRDQYGEPETVNIEYVRDGFSSTSTQLAEQRERDRRYADNLKMLSNYEGASSRSDVRRIKALQRQNCQCIYCGRTITFETCQMDHVLPRKGPGSDSKFENLVATCGECNKSKSDTLYMNWAKTYPNTNLQDVLRRIQEWSKDGWMTDKRWRQYKEALILRLEATEKQEPLDNRSMESVSYMARELRNRIYGFYGWHDQDDALKQGRQRVFVSSGSMTAAARRTPFESPLIKGADEETYESSLPWLDGMKGKTRLDRRHHAVDASIIAMMRPQIVKILTEAQEIRSEQHDKYRKGQTPDYVCKRRDYWRNWRGTPDTRDEEVFNYWAGEQLRTLTDLVSQKMADDEIPVIYPTRLRLGNGSAHKDTVVSMMTRKVGDELSITAINKAESGALYTALTRDSDFDWKTGLSANPNRRIRVHDKWFEADDTIKFLEPAVEVVLKNNTRARIDPEALDKVHSTLYVPVRGGIAEAGNSIHHVRFYKIPKLNSKGKQTGSIYAMLRVLTIDLAMNQYDKETGKKQDLFTLPLPESSLSRRFSEPKLRQALIDGTAEYLGWAVVDDELEIPAFANARITEEQAINGSFTDRLLHSFPGTHKFRFAGFSRNTEIAIRPVQLASEGLIETDENRKRQQLRLTQPNTEYSNSIKNVLKSGLHLKVNTLFQTGILVTRANSQGKQSIRFSTVEE

SEQ ID NO: 195 - protein, 1121 aa, Bifidobacterium dentium LMG 11045
MSVGLAAIEVDETGFPIRILNIQSVIHDGGIDPQLGKKKSISRKAISGVARRTRRMRRRKVVRLRQLDATLESLGFPIVEPDSLDTWEIWLTRAKLASSYIQDDETRKEDVSIALRHIARHRGWRNPYSNVESLFVDVAPSEQYEELRRKAEEKLGTSLSGNPTSAEIVECILKRQVGEVQLRTRSRKGVNGNAVEKEGLLPTKLMQSDNAAEIRRIFKVQRIDDETGRKLLRAVFKACSPKGSVERRVGRDALAPGLPRALKASLAFQEYRIANVLTNLVISEDGTKRKLTIAEKQRVFGFLSSNETDDITWIDVAEKLGLERRQIQGVGCLTADGEERISSTPPRNITALHIHSAKPVIREKLVAWWKAASPTVRETMVELLSNTVDIDRVREDMDYSSAVAFIDSLGDEELTALDSVDLLSGRAAYSRQTLKQLTERMLNTDDDLHEARKAVFGVDDNWKPPVDAISTSVGNPAVDRVLKIVNRYLLACQKRWRNPQSVQIEHVRESFSSVAKAKETERVQGERARYRNDLRRELCEQEGLNKIRESDIRRWESVQRQNGTCLYCGSPITFRTCEMDHIVPRKGVGSTNTRVNLAAACAACNKLKSNTAFSVWARTEGAANRKVSQRDAIERVKTFIFNKSVPPREQRAFKQAVISRLRQAESDPAIDNRSIESVAWMADELHRRIEAYFNQDADVSGNTPATQVWVFQGRVTALARKASGIEGRIHFAGEWKKTRLDRRHHAVDAAVIAMMNHSAAQTLVERDSLRLSQWITRKPETWKNYPFSEGQKKTRFKEWLDCMNALLDLLNDALDSDRVPVTRCQRMSLGNSQAHAATIRKMKRVELFSPMDADLIRRASTPALYCALTRLPEYSPEKGLPENRGREIVLNGRHIRSTETVDFFASGAAQLMVRNGSAEIGDSIHHMRIYRYRKTGAKSQEYVYGMIRVFQIDLLHASSENLFAVQLPSQSVSVRYGDKNVVQAIQEGRAEYLGHIVPNDEILISYEGVRMKDSEKIGAYANDFSGTASELAQRRHWVVVGSDVSKLALRPSYLSEEGLENSGSESERLSKQTRKVIEGKGWVVAVNILAKYHPVVIRRNALGEPRFRTNSGMPVSWRWDR

SEQ ID NO: 196 - protein, 1390 aa, Bifidobacterium merycicum LMG 11341
MSRKNIVEDYAISLDIGNASVGWVAFTPNYRLVRAKGHELIGARLFEPASTAEERRMARTTRRRYSRRRWRLRMLDSMFDQALSEVDPSFLMRRKYSWVHPEDKNNEAHWFGGVLFDSNEQDKRFYEKYPTIYHLRKSLMEDDERHDIREVYLAIHHMMKYRGNFLTEGELAPSSVFDVEDFLKLLTEILQYADEGETDEDLELQADANGLTEALCTTKGSRSIRAKNAISILKEGAALSKRQEAIISAVFAGLEGNKLDLTKVFPNKEYTPEDKKTLALYFNKADYDEKRVAIGDSGLLEDNECDFLDCIRRQYSAIALKQLLGDFTSISESMCARYEQHQRNWDLIKRYCREESNAENINKNYGALVGWEIVGGQRRSIRGAKDYENKRKAANKFFEELIKGSALPDQEKERLLHDIENDELFPVQRDSGNGVIPYQLHLNELKKIIQKQGRYYPFLLETYIKDGKEVNKLEGLLAFRVPYYVGPLVSRDDMQSSDNRENHWMIRRKKGVITPWNFDEMVDKDKSGHEFIKSLVGTDSYLLGETTLPKNSLLYQEFEVLNELNNVRLSIRTGNHWADKRRVRLGHNEKKLLLEELFAKQATVTKKAAENLLRRTYGNTYEISGLADEKKFVSSLSSYGKMCRTLKASYVNSHKDVVEKIIELQTVFEDKKTLKHQLQLLGELAETNCELLSNTHYTGWGKLSRKLLTSKVVVCKIGNDFAPAKHSIIEIMRETDRNFMEIITDKDLGVGEWINQQNVGAEDGNSYQDIIDDLRVSPKVKRGINQAIRVIDDISKAVGKEPSRIFLELAGDVQQSARTVSRKSRLQGLYKSAGLQKEFRDLAESLNECSDNDLRDDRLFLYYTQLGKDMYTGEPLNLDRLSSDYDIDHIIPQAVTQNDSLDNRVLVARVANARKTDSFQYLPEIANRMRNFWQELLDAGLISRVKFDRLNRQNDFSSHEKERFVQRSLVETRQIMKNVATIMRKRYGNSAAVIGLNSELTKEMRQYLGFSHKNRDINDYHHAQDALCLGIAGQFAVNRGFFANGMVSDGAVNSYNLYLQDYLRGYREKMSAGERRRNKAFGFIVGSMNSQDSDKRINPKTGEIAWDDEDKVYLRKVMNYRKMLITQKVGDSFGALYNETRYGTSAKEGVNGIPFDKHKQDTALYGGFSSAKTVYVVLIEAKKKTRLVNITMQEYAELGDHPSDDALRAVLAKKKPEYGKARILLRHIPPMQLIRYGGALVTVKSATELNNAQQLWLPYKEYCLFDDVISSAIDVDEARLCQMLDVILDAIQKYYPKQRFDETGLSAFHNAFNEVSAEDKKRIVGEMVGMLHADAKNANLKALGMSGRWGRMSNQSGYTFADSDEFIFQSPSGLFEKRISVGELKKRRAR

SEQ ID NO: 197 - protein, 1344 aa, Kandleria vitulina DSM 20405
MSQNNNKIYNIGLDIGDASVGWAVVDEHYNLLKRHGKHMWGSRLFTQANTAVERRSSRSTRRRYNKRRERIRLLREIMEDMVLDVDPTFFIRLANVSFLDQEDKKDYLKENYHSNYNLFIDKDFNDKTYYDKYPTIYHLRKHLCESKEKEDPRLIYLALHHIVKYRGNFLYEGQKFSMDVSNIEDKMIDVLRQFNEINLFEYVEDRKKIDEVLNVLKEPLSKKHKAEKAFALFDTTKDNKAAYKELCAALAGNKFNVTKMLKEAELHDEDEKDISFKFSDATFDDAFVEKQPLLGDCVEFIDLLHDIYSWVELQNILGSAHTSEPSISAAMIQRYEDHKNDLKLLKDVIRKYLPKKYFEVFRDEKSKKNNYCNYINHPSKTPVDEFYKYIKKLIEKIDDPDVKTILNKIELESFMLKQNSRTNGAVPYQMQLDELNKILENQSVYYSDLKDNEDKIRSILTFRIPYYFGPLNITKDRQFDWIIKKEGKENERILPWNANEIVDVDKTADEFIKRMRNFCTYFPDEPVMAKNSLTVSKYEVLNEINKLRINDHLIKRDMKDKMLHTLFMDHKSISANAMKKWLVKNQYFSNTDDIKIEGFQKENACSTSLTPWIDFTKIFGKINESNYDFIEKIIYDVTVFEDKKILRRRLKKEYDLDEEKIKKILKLKYSGWSRLSKKLLSGIKTKYKDSTRTPETVLEVMERTNMNLMQVINDEKLGFKKTIDDANSTSVSGKFSYAEVQELAGSPAIKRGIWQALLIVDEIKKIMKHEPAHVYIEFARNEDEKERKDSFVNQMLKLYKDYDFEDETEKEANKHLKGEDAKSKIRSERLKLYYTQMGKCMYTGKSLDIDRLDTYQVDHIVPQSLLKDDSIDNKVLVLSSENQRKLDDLVIPSSIRNKMYGFWEKLFNNKIISPKKFYSLIKTEFNEKDQERFINRQIVETRQITKHVAQIIDNHYENTKVVTVRADLSHQFRERYHIYKNRDINDFHHAHDAYIATILGTYIGHRFESLDAKYIYGEYKRIFRNQKNKGKEMKKNNDGFILNSMRNIYADKDTGEIVWDPNYIDRIKKCFYYKDCFVTKKLEENNGTFFNVTVLPNDTNSDKDNTLATVPVNKYRSNVNKYGGFSGVNSFIVAIKGKKKKGKKVIEVNKLTGIPLMYKNADEEIKINYLKQAEDLEEVQIGKEILKNQLIEKDGGLYYIVAPTEIINAKQLILNESQTKLVCEIYKAMKYKNYDNLDSEKIIDLYRLLINKMELYYPEYRKQLVKKFEDRYEQLKVISIEEKCNIIKQILATLHCNSSIGKIMYSDFKISTTIGRLNGRTISLDDISFIAESPTGMYSKKYKL

SEQ ID NO: 198 - protein, 1352 aa, Lactobacillus agilis DSM 20509
MSEKEYHLGLDIGTNSIGYAVMDCNYHLMRAKGKTLIGTSLFREGNTAAERRGYRTTQRRLKRRKRRLKLLEAFFDPYIFEVDENFLARLHEADISPKDENKRFWGSLLFPNEKDANFYRKYPTIYHLRKALMEEDRKFDVRAIFLAIHHIMKYRGNFLSPLSVDSFKQEGLELKEQLDRQLKRVAELYNELNTDVKINVSDVETIQDIIIDKNKSRRDKAGALKKLLAVSSDRKEINKLNASLAKELSNAILGMKAQFANLLLADDLEIDKNKKNFSLLDTNAEENVSGLLELVNEKQAELFDAIKTIHDQIILNEIVPDGKSISQSMVDKYEAHREQLQVLKALYEKMDAKQIKAIKKAYSLYIDGKDPKAKKVDKRAHQNRADFYKEVKKVLVELDDSRAEKLLGLIEMGQFLPKQRTAMNGVIPNQLHQVELDKIIEMQSKYYPWLAEKNPVKSHQKRAPYKLDELLTFRVPYYVGPMVTSKKQQQTSNSNFAWMVRKQEGEITPWNFEEKVDTIASANDFIKRMTAKDTYLVGEDVLPANSLLYQRYKVLNELNNIKVNGRRLPVELKREAYVALFENGDSKTVSAKCFKNWLNVKLKNLNSLKLEGLSTGTKFDNNLSTYHDLKKIFGKAVDDAGRQKDFEQIIEWLTIFEDKKILRIKLKEIEWLTEENITQLTRLNYNGWGRLSRRLLTGICDSNGQRIMDWLWDTTNNFMQIQSQPDFQKAIVEYNSDKLEQGDIEQILGEAYTSPQNKKAIRKVIKVVQDVEKAMGAKPTSISIEFTRSDGRSELTNSRMTQLQKTLMSLSEEMTDQALLAEFKDFQASKKKLTNKYYLYFTQLGRDMYTGEPLNIDQLSLYSDGDHILPRSFIKDDSLDNRVLTKRAVNNEKSDTVPVCEYGAKMKDFWNDLYDNGLISKQKLANLLTDPDEIGPYKANGFIRRQLVETSQVIKLSAEILQTLYQDTKIIEVRQKYTHELREHFNFVKIRQLNDYHHAFDAYLTAFSGRYLYQRYPKLRGYFVYGDYNKFDAKKDRNYLKSYNFLYDLEEGKTDQIVDNVEHKVFMNRQDAINQLKKAYEYKYMLVSQETYTNSGAMFKETIYPVNPKQKLIQKKNDKPVDIYGGYSNNYDAYLSIVRLEDKKGIKFRVVGIPMRNKAELDNLAKEDHNGYMQRLNEIVDEQINSSGKKKTFRIILPKVHFKQLVEDDSGKFMLGSAAYPYNAKQLVLSVKSIESLANKDASDRELVAVYEEILNVVNDKFTLYDARQFRNKLTSSKDKFVELNTADKVTELLDILDGLHANPVVKKLKIISGSPFGFLQRPSGIVLTENAKLIYQSPTGIFERVVYLRDL

SEQ ID NO: 199 - protein, 1318 aa, Lactobacillus animalis DSM 20602
MGSNMLKKDYSIGLDIGTNSVGHAVVTDDYKVPTKKMKVFGDTSKKTIKKNMLGVLLFNEGQTAADTRLKRGTRRRYTRRKNRLRYLQEIFAPELAKVDPNFLYRLEESSLVAEDKKYDVYPIFGKREEELLYHDTYKTIYHLRSALANNDQPADLRLVYLALAHIIKYRGNFLLEGEIDLRTTDINKVFAEFSETLNENSDENLGKLDVADIFKNNTFSKTKKSEELLKLSGAKKNQLAHQLFKMMVGNMGSFKKVLGTDEEHKLSFGKDTYEDDLNDLLAEAGDQYLDIFVAAKKVYDAAILASILDVKDTQTKTVFSQAMIERYEEHQKDLIELKRVFKKYLPEKCHDFFSEPKISGYAGYIDGKVSEEDFYKYTKKTLKGIPETEEILQKIDANNYLRKQRTFDNGAIPHQVHLKELVAIVENQGKYYPFLRENKDKFEKILNFRIPYYVGPLARGNSKFAWLTRAGEGKITPYNFDEMIDKETSAEDFIKHMTINDLYLPTEPVLPKHSLLYERYTIFNELAGVRYVTENGEAKYFDAQTKRSIFELFKLDRKVSEKMVIKHLKVVMPAIRIQALKGLDNGKFNASYGTYKDLVDMGVAPELLNDEVNSEKWEDIIKTLTIFEGRKLIKRRLENYRDFLGEDILRKLSRKKYTGWGRLSAKLLDGIYDKKTHKTILDCLMTEDYSQNFMQLINDDNYSFKETIKNAQVIEKEETLAKTVQELPGSPAIKKGILQSLEIVDEIIKVMGYKPKSIVVEMARETQKTHGTRKREDRVQQIVENLKDANELPEKLPSNAELSDERKYLYCLQNGRDMYTGAPLDYDHLQFYDVDHIIPQSFLKDDSIENKVLTIKKENVRKTNGLPSEAVIQKMGSFWKKLLDAGAMTNKKYDNLRRNLHGGLNEKLKERFIERQLVETRQITKYVAQLLDQRLNYDGNGVELDEKIAIVTLKAQLASQFRSEFKLRKVRALNNLHHAHDAYLNAIVANLIMAKYPELEPEFVYGKYRKAKFKGLGKATAKNTLYANVLYFLKENEVYPFWDKARDLPTIKRYLYRAQVNKVRKAERQIGGFSDEMLVPKSDSGKLLPRKEGLDPVKYGGYAKAVESYAVLITADEVKKGKTKKVKTLVNIPIIDSKKYEADPTAYLASRGYTNVTNSFILPKYSLLEDPEGRRRYLASFKEFQKANELILPQHLVELLYWVNAKDGEQKLEDHKAEFKELFDKIMEFADKYVVAPKNSEKIRRLYEENQDATPMELGKNFVELLRYTADGAASDFKFFGENIPRKRYNSAGSLLNGTLIYQSKTGLYETRIDLGKL

SEQ ID NO: 200 - protein, 1316 aa, Lactobacillus apodemi DSM 16634
MLQKNYTIGLDIGTNSVGYAVINDNYKVPAKKMKVLGNTDKKTIKKNLMGVLLFDAGETAATTRLKRGTRRRYTRRRNRLRYLQEILGPELAKVDANFLHRLAESSLVTEDKEFSAYPIFGDREEELLYHKTYKTIYHLRSALANKDEKADLRLIYLALAHIIKYRGNFLIEGEIELSDTDIDKVYADFCRSFNELFDTEVLQEIEVEAIFKDKTLSKTKKAEELVKVSGVKKNQVAHQFLKMMVGNTVNFKKVFNLTEDQKLSFGTDSYEDELNDLLAKSDDRYLDVFVAAKKVYDTAILANILNTKNSVATKTIFSQSMIERFKDHQKDLKELKQLFKTYLPEKYPDFFGNSKEDGYAGYIEGKTNEEKFYTHTKKILKNIPQAASVLAQIDVGNYLRKQRTFDNGVIPHQIQLKELLAIIENQGKYYPFLLENKEKIAKILTFRIPYYVGPLARGNSRFAWLKRVGKEKITPFNFENVVDLESSAERFIERMTLNDLYLPEEKVLPKHSMLYEKFSIFNELAGIRYITDNGEMKFLDAQTKQSIFELFKQERTVKEKKVLDLLKTLMPSERVVAIKGIDNGKFNASFGTYHDLSKMGFKTEKIASESNQARWEEIIKTLTIFEDRKLIKSRLRKYDDFLNEKEIGALSKRKYTGWGRLSAKLIDGIYDKKTHQTILDFLMNEDYNQNFMQLISNDNYSFKKIIEDSQVIKEEGSLTEVIQELPGSPAIKKGILQSIEIVDELVKVMGGNPKKIVVEMARETQKTHGTTRREARIKEIIKNLNKLKLNELPKDLPSNEELSDEKVYLYCLQNGRDMYTGAPLDLDNLSQYEVDHIIPQSFLKDDSIENKVLTAKIENSRKTNGLPSVEIAKKMGAFWRSLLKVGAISEKKYRNLRRSLHGGMTEKLKETFVKRQLVETRQITKYVAQILNSRFNEEKNEDKVAIVTLKAQLTSQFRKDFELYKVREINNLHHAHDAYLNAVLATLLMTSFPELEPEFVYGKYRKTKFKGLGKATAKNNLYTNILQLLKEESAQYWDTKERDLATIKKNVYQAQVNKVRKVERQTGSFYDETVAKKSASQKLFPRKNGLDPVKYGGYQRANEGYSLLFRADMLNKRGKTKSVKTLVKIPIIESAQYLADPTEYLAKRGYYNVSEHSLLLPKFSLLENNNGLRRYLASSNEFQKANELILPKHLVRLLYWSQSKQRKEELNKHRAEFAELFTYIMDFADKYVVAPKNSEKIKNIYENNKDSSVEVLGKNFIELLKYTADGAASDFTFFDTKIPRKRYNSAGDLLDGTLIYQSKTGLYETRIDLGAI

SEQ ID NO: 201 - protein, 1377 aa, Lactobacillus brevis subsp gravensis ATCC 27305
MESNHDGEQVKYTLGLDIGTSSIGYAAIDKHQKPIRAKGKHVIGVRLFQEGQTAADRRAFRTTRRRLKRRKWRLNLLNRLFDPYLSEVDPNFLPRLRQSNLSPKDDNKHFNGSTLFPDKTDAAFYRQYPTMYHLRYALMTEKRKFDIREVYLAIHHIVKYRGNFLNSATVDSFKTSNIDFTSQFDRLNELYRQVILDEPFQINMDQVDEMTNKLLDNDALKLDTQKQVAKLLPVIYNDKPIDKQYTRIATEFSKAILGYKTKLDVILNLDTQNAKDWVIRLDDEDIDDKLPALVENLDESRQEIVTIIRDLYAQITLNAIVPKGKSLSESMVDKYNDHKDHLDLLMGLIHELGDDSAKGIKLREAYTQYVGKSDDKTLNQDDFYAAIKKNLDEDSKRSPKIQRLIEQASFMPKQRTSANGVIPHQLHQLELDRIIENQGRYYPFLKKPNPNTHKPNGGKYKLDELVAFRIPYYVGPLITKRDQEKTSGADFAWMIRKPGQEGEITPWNFDQKVDRMASANRFIRRMTTKDSYLVAEDVLPDASLIYEKFKALNELNMLKVNDSRLSPSQKQDLFNNLFKKQKTIRTKKLQTYIRTNWELPSVMISGLADPDKFNSSLSTYIDFRDIFGEKVDDPNRQADYEEIIEWSTVFEDRKIYQAKLNQLDWLTEPQRKALLTKRYTGWGRLSKKLLTGLKDQNGDSILDQLWKTNDNFMQIQSRDEFAKQIHDENAKQFHEANNVDDILDDAFTSPQNKKAIRQVDKVVQDVVKAVGYAPDKIAIEFTRSLENNPQRTVSRQRQLQAAYKNIPREIMKSGLMAELGSVADSKKVLSDKLYLYFTQMGKDMYEDKTINIDNLPNYDIDHILPQAFIKDDSIDNRVLISKEENARKSNRVPLKFFGAKRMGFWKDLLNNGLISNRKFQNLTTDPEKISKYSAKGFIHRQLVETSQVIRLVANILGNEYSQAGTTIIEVSAKMNRQLREDFHLIKNRNVNDYHHAMDAYLTAYVGDYLYLRYPKLRPYFVYGDFKKAEDQDLNIRNFNFLHDLKDNESLDKIVDSETGEIVWEKHGSVKQLKKVYHYKFMLVSQEVYTRQDALFNQTIYPASDADKRKLIPIKNSKPVDVYGGYSGNIDAYMAIVRVHGKKEDNYKVVGIPMRAVTKLKKAEKEGHDSYLNAVHEVLKPQFTKKKKNRKTGEITETVDEFDVLLGKVYYRQLIVDGNKKFMLGSSSYQYNAKQLVLSDKAMQVLSKNGKVKSQDENQNLIDVYDEILEKVDQYFELYDQRHYRESLHKGRGIFVNLPLSNQYDGSKLTSYGKYETIDAILNGLHANATMSNLRYLGISSPFGKMQASNGLTIDPDSIICYQSPTGLFERQIKLSDL

SEQ ID NO: 202 - protein, 1381 aa, Lactobacillus buchneri DSM 20057
IEGIKVESNHDGEQVKYTLGLDIGTSSIGYAAIDKHQKPIRAKGKHVIGVRLFQEGKTAADRRAFRTTRRRLKRRKWRLNLLNRLFDPYLSEVDPNFLPRLKSNLSPKDDNKHFDGSTLFPDKTDAAFYRQYPTMYHLRYALMTEKRKFDIREVYLAIHHIVKYRGNFLNSATVDSFKTSNIDFTSQFDRLNELYRQVILEEPFQINMNQVDKMTNKLLDNDALKLDTQKQVAKLLPVIYNDKPVDKQYTRLATEFSKAILGYKTKLDVILNLDTQNAKDWAIRLDDEDIDDKLPALVENLDESRQEIVTIIRDLYAQITLNAIVPKGKSLSESMVDKYNDHKDHLDLLMGLIHELGDDSAKGIKLREAYTQYVGKSGDKTLNQDDFYAAIKKNLDEDSKRSPKIQRLIEQASFMPKQRTSANGVIPHQLHQLELDRIIENQGRYYPFLKEPNSNTHKPNGGKYKLDELVAFRIPYYVGPLITKQDQEKTSGADFAWMIRKPGQGGEITPWNFDQEVDRMASANTFIRRMTTKDSYLVAEDVLPDSSLIYEKFKVLNELNMLKVNDRRLSISQKQDLFNNLFKKQKTIRTKKLQTYIRTKWELPSVMISGLSDPDKFNSSLATYIDFRDVFGEKVDDPNRQADYEKIIEWSTVFEDRKIYQAKLNQLDWLTESQSKALLTKHYTGWGRLSKKLLTGLKDQNGDSILDQLWKTNDNFMQIQSRDEFAKQIHDENAKQFHEANNVDDILDDAFTSPQNKKAIRQVDKVVQDVVKAVGYAPDKIAIEFTRSPQDRPQRTFSRQRQLQSTYLNVAKALMKSNLNQELKSVIDSQQTLTDKLYLYFTQLGQDMYTGKEINFDELVNYQIDHILPQAFIKDDSLDNRVLVSAPINNAKSDNVPVKKFGAKMGYFWKQLAENHLISKRKLNNLTTDPDKIGKFTAQGFIHRQLVETSQVIRLVANILGNEYGHDGTTIIEVTAKMNHQMRKDFDLIKIRDVNDYHHAMDAYLTAYVGDYLYLRYPKLRSYFVYGDFKKLKDQSLKIRNFNFLHDLTNDEAGDKIVDQETGEIIWDKHESVKQLKKVYHYKFMLVSQEVYTRQDALFNQTIYPASDADKRKLIPIKNNKPVDVYGGYSGNVDAYMAIVRIHGKKEDKYKVVGVPMRAVADLKKAESKGRDNYLNAVHEVLKPQFTKKKKDRKTGEITEMMDDFDVLLGKVYYRQLIVDGNKKFMLGSSTYQYNAKQLVLSDKAMQVLSKDDKLKNQDENQNLIDVYDEILEKVDQYFELYDINKFRQKLHDGRKKFIELPVDNDFNGKKLISYGKRATIISILNGLHANATMSNLKYLGISSPFGMLQVPNGIILSPASRICYQSPTGLFERKVKLSDL

SEQ ID NO: 203 - protein, 1371 aa, Lactobacillus buchneri CD034
MKVNNYHIGLDIGTSSIGWVAIGKDGKPLRVKGKTAIGARLFQEGNPAADRRMFRTTRRRLSRRKWRLKLLEEIFDPYITPVDSTFFARLKQSNLSPKDSRKEFKGSMLFPDLTDMQYHKNYPTIYHLRHALMTQDKKFDIRMVYLAIHHIVKYRGNFLNSTPVDSFKASKVDFVDQFKKLNELYAAINPEESFKINLANSEDIGHQFLDPSIRKFDKKKQIPKIVPVMMNDKVTDRLNGKIASEIIHAILGYKAKLDVVLQCTPVDSKPWALKFDDEDIDAKLEKILPEMDENQQSIVAILQNLYSQVTLNQIVPNGMSLSESMIEKYNDHHDHLKLYKKLIDQLADPKKKAVLKKAYSQYVGDDGKVIEQAEFWSSVKKNLDDSELSKQIMDLIDAEKFMPKQRTSQNGVIPHQLHQRELDEIIEHQSKYYPWLVEINPNKHDLHLAKYKIEQLVAFRVPYYVGPMITPKDQAESAETVFSWMERKGTETGQITPWNFDEKVDRKASANRFIKRMTTKDTYLIGEDVLPDESLLYEKFKVLNELNMVRVNGKLLKVADKQAIFQDLFENYKHVSVKKLQNYIKAKTGLPSDPEISGLSDPEHFNNSLGTYNDFKKLFGSKVDEPDLQDDFEKIVEWSTVFEDKKILREKLNEITWLSDQQKDVLESSRYQGWGRLSKKLLTGIVNDQGERIIDKLWNTNKNFMQIQSDDDFAKRIHEANADQMQAVDVEDVLADAYTSPQNKKAIRQVVKVVDDIQKAMGGVAPKYISIEFTRSEDRNPRRTISRQRQLENTLKDTAKSLAKSINPELLSELDNAAKSKKGLTDRLYLYFTQLGKDIYTGEPINIDELNKYDIDHILPQAFIKDNSLDNRVLVLTAVNNGKSDNVPLRMFGAKMGHFWKQLAEAGLISKRKLKNLQTDPDTISKYAMHGFIRRQLVETSQVIKLVANILGDKYRNDDTKIIEITARMNHQMRDEFGFIKNREINDYHHAFDAYLTAFLGRYLYHRYIKLRPYFVYGDFKKFREDKVTMRNFNFLHDLTDDTQEKIADAETGEVIWDRENSIQQLKDVYHYKFMLISHEVYTLRGAMFNQTVYPASDAGKRKLIPVKADRPVNVYGGYSGSADAYMAIVRIHNKKGDKYRVVGVPMRALDRLDAAKNVSDADFDRALKDVLAPQLTKTKKSRKTGEITQVIEDFEIVLGKVMYRQLMIDGDKKFMLGSSTYQYNAKQLVLSDQSVKTLASKGRLDPLQESMDYNNVYTEILDKVNQYFSLYDMNKFRHKLNLGFSKFISFPNHNVLDGNTKVSSGKREILQEILNGLHANPTFGNLKDVGITTPFGQLQQPNGILLSDETKIRYQSPTGLFERTVSLKDL

SEQ ID NO: 204 - protein, 1171 aa, Lactobacillus cacaonum DSM 21116
MAKYSVGLDIGISSVGWAIIDIETKQIVNLGSRIFPSGNAAGNQERRGFRGIRRLIRRRKNRLTDLKKLLGETFFSDLKKIDSNGYEYYDIDFQINANPYELRVKGITEKLSKKELAVVLHHIIKHRGISYDLGDLEDDGTSGVSDYKNSININRQLLREKTVGQIQLERLIEFNQVHGQVKKAEDVSLLNVFPSSAYRDEANKIMIKQQEFYSEITNSFMEQVDQLVSRKRDYFIGPGNEKSRTDYGIYKSDGRTLDNLFAELIGTDKINGEKRASASSLTAQVYNLLNDLNNLHVSNTEDGKLTTSTKKEIIKAAKTTDGVFGISQICKIIGCKKEEITGFRQDKSEKKVIHTLAGYRKIRKALATINIEANELNPTVFDQIADILTLNTEKAEIRKQLDKVQLDITDEMKELVIDKNKDFLVDGRATWHSFSYQTLNMLIPELLNTSEEQMTILTRMGLMKSDNEKYRGLKKIPAEKIASEIFNPVVAKSTREAIKVFNAISKEIGKNNIEHVVIELPRDDNEEDEKRKIQKLQKANETEKEAADNLVKHKLGISDSALIAHYRKFKGLSQKVRYWYQQETYCPYCGKIIEATQLINNNDNFEVDHIIPISVSYDDSQNNKVLVHSQCNQAKEKQTPLGWINNGGGFGQSKNEYTNRVKNNKKYSKNKVDNLLNETDLTDIITQRSFIQRNLNDTRYAARTVLDEFYSFFKSNDLPTKVKVVRGKWTSQMRRKWNNVGGLRKTRDTHHHHAIDASIIASFPLLRAFDRAIKLIDVDKETGEIVQYGKASLNGDVIEEKSVIQAPIIKNEKFEKLVDEIYNFPLFKQVELANNIENPENPVKFSHHVDKKANRTVANQTIYSTRIKKTEKIVRKKVTAKEEEYVIGTIKDIYDVTNFEKFKKLYDESSKKDDIKFLMQKNDPKTWEKLVEIMNTYPDYEEISQLDGKVKRVKVSPFKLYFRENGFITKYAKHNNGPKVVSIKYYDSKLGNHIDITPVNANNKVILQSLKPWRTDVYYNNETQQYELLGLKYSDLKFTKGVYGITREAYEKLKYGYTDGVPAWKPISKESEFKFSLYRNDRVRIINEAGEKIDLLFGSRNETSEGYVEMKPIFKTNFDDAEEASFYGKTSNKRLIKKMARKGYQIYKVNTDILGNLYYTAKESNEPKLDL

SEQ ID NO: 205 - protein, 1362 aa, Lactobacillus casei str Zhang
MTKLGKPYGIGVDIGSNSIGFAAVDENSHLIRLKGKTVIGARLFEEGKAAAKRRAGRTTRRRLSRNRWRLSFLRDFFESHITPTDPNFFMRQKYSEISPKDKARYKYEKRLFNDRTDAEFYQQYSTMYHLRNRLMTDPSRADVREIYFAIHHILKSRGHFLTPGDAKDFNTNDVALDEIFPALQDAYAQVYPDLGITFDEDKANEFKTILLNEIATSIDTQRALVKLLLAEEDDKDILKQQKQVLTEFAKAVVGLKTKLNLALGTEVDSSEATAWNFSLGQLDDKWAGIESAMTDEGTEILDQIRDLYRARLLNGIVPTGKTLSQAKVDDYTQHHEDLQLFKAYLKQLEDDGTAKAIRQLYDRYIDGDDAAPFLRENFVKALTKDVTAHPNTKSPELLERLAQPDFMLKQRNKANGAIPVQMQQRELDQIIKNQAVYYDWLAAPNPVEKHRKSMPYQLDELLNFRIPYYVGPLVTAKEQKAAQGGVFAWMVRKDPEGNITPYNFDEKVDREASANTFIQRMKTTDTYLIGEDVLPKQSLLYQRYEVLNELNNVRVNNEKLSIEQKQQVIRELFERHNSVTIKQFAENLRAHGDYAHIPEIRGLADEKRFLSSLSTYRQLKSLLPEAIDDPAKQADIENIIAWSTVFEDAAIFKTKLKEISWLGSEAITKLSNIRYRGWGQFSRKFLNGLTLGNGHTIIQELLLSTNNLMQILTDETLQKKMTELNADKLKTANINDAIDNAYTSPSNKKALRQVLRVVDDIKRAADGQDPSWLYVETADGGGTPGKRTRARQHQLQEIYANAAHELIDTAVRGELEDKISDKADFNDRLVLYFMQGGRDIYTGAPLNIDQLSSYDIDHILPQSLIKDNSLDNRVLVHAIINREKNATFASTIYAQKMNATWRQWHEAGLISGRKLRNLQMRPDQIDKYASGFVARQLVETRQIIKLTEQIVAAQYPDTKIIAVKAGLSHQLREELEFPKNRDVNHYHHAFDAFLAARIGTYLLKRFPNLQAFFTYGKFTKADVKKLRGFNFIRDITHAEDKIVAKDTGEVVWDKQRDVDELDRIYNFKRMLITHEVRFETADLFKQTVYGARDSKEAGGSKQLIPKKKGYPVDIYGGYFRENTAYLAVVKVTKKTETIFKVVKIATSQVAALNKARSRSTAEELSVLTELLKPKFSKVGKNGKITDTPFEVVLPRVPREQLFYNAKYGFFMVNSDTMFHNFQEIWVSRSDQKILQQIRKAKIDYPNVDQDLDNLFHNLADQIVKYFDLYSIAGFKEKISQSQNTFNDLAVDDTDQSVGKITVINELLKGAQANGMTGSLKVLKISTPFGFTQDKSGVLTKDSSIIYQSPTGLFERSVRLTDL

SEQ ID NO: 206 - protein, 1395 aa, Lactobacillus ceti DSM 22408
MSKKYQNTKYYVGLDIGTSSVGWAVTDANYELLKVNGHKTWGSRLFTEAETALERRTHRATRRRLQRRKQRLDLLDELFAEELAKVDPQFLLRLKESQYHMEDKSTDDKYVLFNDQNRTDGEFFTEYPTIYHLRSELMQGKKEDIRAVYLALHHIVKYRGHFLLPGDNYDMQGNLSELIKRLFKFIEETLFIEDLGLTDEIQSKIEEILLTKTKTRLDRQKEIVKLFNTKHQKLDDKQKKLLEAIFKLCLGLKGNMVNIFGDKGEYGIDFTDVEDKKKKVEFSADYDNNINDYVDFFGEYFELLEITKKINDTVIFSEILVDGKGFSESKVISYEKHQQDLRKLKTLLKSLDKTLGYKYGEGLYQKILLDDVKSNYVNYSGNSQKLKKCTKDEFYGFIKSKLNSVTKKEKVSEAQQKEIAQILADMEFGDYLPLQRTTDNGVIPNQLHKKELIEIIEQQTKYHDFFNDVDENGLTIKDKIISLMTFRIPYYVGPLNDYHKVADGTGHAWIEKKKDGKIYPWNFDEMVDTEATAEKFIKNLTNKCTYLKGEDVLPKESKLYSEFMLLNELNNIKIDNQKLDPKLKMKMVSELFMKKNEKITKKKIVDYLRSIGQANGNEMVSGIDREIKSDLKTIHKIQHYYQDASLEMAENIIRWNTIFNDSTSDILKDKITKAYGDVLTPGQIKGLSNLACKDWGKLSEKFLTGIRCDVGEFKNISIIQAMRDTNNNLMELLSNKYEFMDKIQEYNKEYYGDFTFKAEPSIMDDLYVGPGPKRAIWQAVRIVEEIKRIMGHDPEKIFLETTRTNRAPKVKNTKRYDALEKKYESVKEHEYAEVKKEFEIEKNDSLNIKKLFLYFTQLGHCMYSDEKIPYNELFTNRYDIDHIYPRSKTRDNSMDNLVLVKAECNRDKKDNYPIKLKTNIQQKCQVRWAYLRDKKLITEEKYNRLVRKTPLTEDELSQFIARQLVFTSQSVKATAEVFKRLYEDSKICYVKAENVSDFRYGSTRKMSKDDQPQPFIKNRDVNDFHHAKDAYLNIVVGNVYDVKFTQNPTRFIKANKDYSLNYIFRYPVNKKGENVWDPEQSMKIVEKTLKSNDVRVTKLVKPITSPISNETLHKALKCKPGSYLPRKSSKGTPLADVTKYGGYEKIKNAYYSIYKYTYMKKKECMEEFLLVPIPIHLVNNDEELPKYINDKIAERAKKKKLETVECIVKELYQGTLVRINGYDYRIAGSSGKQFELHNGINLIVEPWVEKVLKETDKFVRKSNSKLDKKQQKENTTETLIEKQLNDVFEYLCRKLNQGIFKNNKHTLPAKLLGDSIQKRFEDASIEDEFEVIKELISAIAKNPQNFKTIQKVLDISGSSIPRFNLKLTKNNVDEFIIKNESVTGLFTHEKVIFRK

SEQ ID NO: 207 - protein, 1354 aa, Lactobacillus coryniformis subsp coryniformis KCTC 3167
MTLHYNVGLDIGTNSVGYTIVDDNGKILQVKGKNGYGVRVFKEGATAAERRIFRTTHRRLKRRKWRLRLLQDFFEPYILPQDDGFFIRRKESNLVLNDRDEDTASLFNDRSDRDFYQAYPTIYHLRQALMTEKRQFDVREIYLAMHHIIKYRGHFLLNGTVNNFTNNKIDLHSDFEELNALLLNVIPELKFQIDLDHSTMFQTTLLNTTISRSGRQRDLVKSFYNGSDDKQLAKQQKSVATELLKAILGLKAKFHKLFNLDLLETTEWEFSFDAEDIDDKLAKLEPLMTENQQQVMDILQRIFAAITLNGIVPEGKTLSASKVDSYQKHKQDLKLLKAIAQHSDKKTATVLQTAYNEYINGIASKPLKQEDFYKRLTNAVKKSSDPQVADMLALIDQEKFLPKQRTKENGAIPHQLHQLELERIIDNQKDYYPWLAELNPNQARQKVAKYKLSELVAFRVPYYVGPLIEPEVQQATSNAHFAWMARKEAGPITPWNFDQKVDRNVSAERFIKRMTTKDTYLLAEDVLPLHSLLYQRFIVLNELNNVRVNGQKLTKKQKQAVYQDLFKRQPHVTKKQFKSYLVQTGEFAESSKIEGLANETSFNSGLTTENELRKIFGAQLDEARYQVDFEQIIEWATLFEDAKILRTKLAEITWLTTEQIEKLAGIRYRGWGRFSRKLLAGLRDQNGQQIIDLLWDTPNNFMVIVSQAAFSEAITKENEKLIDRRGAQDVITDLYTSPQNKKALRQVLAIVADVQKAMGGVPPQRIFIEFAREDEKNPRRSVERSRQLEKLYQTISNEFLINSEVRQELKEAVDQKVNFKDRLFLYFLQGGVDLYSGKRINIDQLSHYDIDHILPQSFIKDDSLDNRVLVSQKLNRSKSDSVPLSEFANYKFGPAMQAKWLQLKEAGLLSKRKYDNLTLDPTKLSKFAPLGFVNRQLVETRQVIKLAANLLASEETKVVTIKANMTHQVRKELDFPKNRNVNNYHHAFDAYLTAFVGIFLSKRYPKLKPYFTYGDFQKGNKLPDLKNFNFLYELKNKDRSIDSNTGEIIWDKQRDLAYMNKIYNFKKVTVVHEVLTKSGALYNQTLYKASEDKASGRGTKQLIRKKDNMPTELYGGYTGSTSAFMSIVRLWKKDKPYYKVVGIPTRMAAKLANQAQLLDYLTKKFTTRKLVKKTGDYKTTVERFELVVPKVGFNQLVIDGGQPFMLGSATYQYNARELFISKEAVKALNKQLSTHVDLVQVFDEILVQVNRWFPLYDTNGFREKLSHGRDRFMKLNDSFEEKSDTQIDVLNRILIGFHANAARTNLKILGLGTDLGFMTQQAGIRLTEKAILVHQSPSGLFERKVALRDLKGLR

SEQ ID NO: 208 - protein, 1119 aa, Lacotbacillus coryniformis torquens
MGYRIGLDVGITSTGYAVLKTDKNGLPYKILTLDSVIYPRAENPQTGASLAEPRRIKRGLRRRTRRTKFRKQRTQQLFIHSGLLSKPEIEQILATPQAKYSVYELRVAGLDRRLTNSELFRVLYFFIGHRGFKSNRKAELNPENEADKKQMGQLLNSIEEIRKAIAEKGYRTVGELYLKDPKYNDHKRNKGYIDGYLSTPNRQMLVDEIKQILDKQRELGNEKLTDEFYATYLLGDENRAGIFQAQRDFDEGPGAGPYAGDQIKKMVGKDIFEPTEDRAAKATYTFQYFNLLQKMTSLNYQNTTGDTWHTLNGLDRQAIIDAVFAKAEKPTKTYKPTDFGELRKLLKLPDDARFNLVNYGSLQTQKEIETVEKKTRFVDFKAYHDLVKVLPEEMWQSRQLLDHIGTALTLYSSDKRRRRYFAEELNLPAELIEKLLPLNFSKFGHLSIKSMQNIIPYLEMGQVYSEATTNTGYDFRKKQISKDTIREEITNPVVRRAVTKTIKIVEQIIRRYGKPDGINIELARELGRNFKERGDIQKRQDKNRQTNDKIAAELTELGIPVNGQNIIRYKLHKEQNGVDPYTGDQIPFERAFSEGYEVDHIIPYSISWDDSYTNKVLTSAKCNREKGNRIPMVYLANNEQRLNALTNIADNIIRNSRKRQKLLKQKLSDEELKDWKQRNINDTRFITRVLYNYFRQAIEFNPELEKKQRVLPLNGEVTSKIRSRWGFLKVREDGDLHHAIDATVIAAITPKFIQQVTKYSQHQEVKNNQALWHDAEIKDAEYAAEAQRMDADLFNKIFNGFPLPWPEFLDELLARISDNPVEMMKSRSWNTYTPIEIAKLKPVFVVRLANHKISGPAHLDTIRSAKLFDEKGIVLSRVSITKLKINKKGQVATGDGIYDPENSNNGDKVVYSAIRQALEAHNGSGELAFPDGYLEYVDHGTKKLVRKVRVAKKVSLPVRLKNKAAADNGSMVRIDVFNTGKKFVFVPIYIKDTVEQVLPNKAIARGKSLWYQITESDQFCFSLYPGDMVHIESKTGIKPKYSNKENNTSVVPIKNFYGYFDGADIATASILVRAHDSSYTARSIGIAGLLKFEKYQVDYFGRYHKVHEKKRQLFVKRDE

SEQ ID NO: 209 - protein, 866 aa, Lactobacillus crispatus FB049-03
MGATQQINNIIIDIDVQGEKMGWRNVIITQHAKLTYSMNMLIVQTKDGINQIPIEDINLVLISTSQAVITSALISKLAKNQCKVIFVDDKYQPVTETVNYYPGARDIKKLKMQFEWNERRKENLWTKIVAAKLKNQISVLKNYRIDETEVEQELYKLEVNDLSNREAAAARKYFMKLFGKDFIRRNSGVINAALDYGYSILLSSFDREIAMNGYLTYLGIHHHSVENQFNLACDLMEPFRSIVDYWVKAHENITSFTPDIKYGLVELLSLQIKFNGRNTILTNAISVYVRSCLRYLSGETDDIRIEMSLCNEVPNDAINDNVKYYLYFMQLGRDAYTGKPINIDEVSQYYDIDHILPQSFIKDDSLNNRVLVAKPINNGKSDGVPLKLFGDNLATGLGITVKQMWNNWADKGLINKAKQNNLFLDPENINKHQASGFIRKQLVETSQIIKLATTILQAEYPKTKIIVVKASSNHYLRNEFDLYKSREVNDYHHAIDAYLTTICGNLLYQAYPKLRPFFVYGQFKKFSSDPKKENEILKKTKNFDFVAKLLGSKAPNEIRSQQGKVLFEKNKIRLQLNKAYNYKYMLVSRDTTTKNQEMFGMTIYPRAERDIAKSRKLIEKRKGFSTDIYGGYTGTAAAYMAIVRINKTKSSQYKVIAVPMTKRAILNKAEKEGNYEKILKQILSPSILYNDKGKRKAGVISFDIIKGKVPYNQVVQDGNKKFLLKSAIYLCNAKQLVLSEEAMRVITGHWLDSDKQDQELLDVYDEILEKIDRYLPLFDIRDFRNKLHKGREKFLKLNAEDKFKAIIQILKGLHDNSDTGELKDIGITVPFGQLQNNSGITLSSDTILVYQSPTGLFEKRVKISSL

SEQ ID NO: 210 - protein, 1368 aa, Lactobacillus curvatus CRL 705
MSRPYNIGLDIGTSSIGWSVVDDQSKLVSVRGKYGYGVRLYDEGQTAAERRSFRTTRRRLKRRKWRLGLLREIFEPYITPIDDTFFLRQKQSNLSPKDQRKLYTQTSLFNDRTDRAFYDDYPTIYHLRYRLMTEKRQFDIREIYLAMHHIVKYRGHFLNEAPVSSFKSSEINLVAHFDRLNTIFADLFSESGFQLETDKLAEVKALLLDNQQSASNRQRQALSLIYTPSTNKAVEKQNKAIATELLKAILGLKAKFNVLTGIEAEDVKAWTLTFNAENFDEEMVKLESSLDDNAHQIIESLQELYSGVLLAGIVPENQSLSQAMITKYDDHQKHLKMLKAVREALAPGDRQRLKQAYDQYVDGQENTKAYSKEDFYGDITKALKNNPDHPIVSEIKKLIELDQFMPKQRTKDNGAIPHQLHQQELDRIIENQQQYYPWLAELNPNSKRQTVAKYKLDELVAFRVPYYVGPLITAEQQRQSSDAKFAWLIRKAEGRITPWNFDDKVDRQASANEFIKRMTTTDTYLLAEDVLPKQSLIYQRFEVLNELNGLKIDDQPITTELKQAIFTDLFMQKISVTVKNIQDYLVSEKRYASRPAITGLSDENKFNSRLSTYHDLKMIVGDAVDDVDKQADLEKCIEWSTIFEDGKIYSAKLNEIDWLTDQQRVQLAAKRYRGWGRLSAKLLTQIVNANGQRIMDLLWDTTDNFMRIVHSEDFDKLITEANQMMLAENDVQDVINDLYTSPQNKKALRQILLVVNDIQKAMKGQAPERILIEFAREDEVNSRLSVQRKRQVEQVYQNISNELLNNTEIRNELKDLSNSALSNTRLFLYFMQGGRDMYTGDSLNIDRLSTYDIDHILPQSFIKDNSLDNRVLVSQKMNRSKADQVPTDFTSVELGQKMQIQWEQMLRAGLITKKKYDNLTLNPDHISKYAMKGFINRQLVETRQVIKLATNLLMEQYGEDNIELITVKSGLTHQMRTEFDFPKNRNLNNHHHAFDAYLTAFVGLYLLKRYPKLKPYFVYGEYQKASQQDKWRNFNFLNGLKKDELVDENTEAVIWDKESGLAYLNKIYQFKKILVTRGVHENSGALFNQTLYAAKDDKASGQGGKQLIPAKQDRSTALYGGYSGKTVAYMCIVRIKNKKGDLYKVCGVETSWLAQLKQLTDEDSQKAFLEQKISPQFTKVKKQKGNIIEAVEEFEVIAPHILINQRFFDNGQELTLGSATYKHNEQELILDKTAVKLLNGALPLTQSEELAEQVYDEILDQVMHYFPLYDTNQFRAKLSTGKAAFMKLPWKSQWDGNKMVQVGQQVILDRILIGLHANAAMSDLKVLKMTTPFGMIQQSTGITLSADTQIIYQSPTGLFERRVALRDL

SEQ ID NO: 211 - protein, 1427 aa, Lactobacillus delbrueckii subsp lactis CRL 581
MAKPKDYTIGLDIGTNSVGWVVTDDQNNILRIKGKKAIGARLFAEGKVAAERRSFRTTRRRLSRRRWRIKLLEELFDKEIAKVDPSFFARLHESWISPKDKRKRYSAIVFPSPEEDKKFHESYPTIYHLRDKLMKDDQKHDIREIYIAVHQMIKARGNFLHDESVETYRSGMSSLGGRSERTILSVQTLEELNDLFAENEGTEEAKLNVASAEQINDILTGGHLNADSQKEIGNLLLPSSFPSFDDKAKEKQVKKLIKNVATNISKAWLGYKADFSTILNLANVDKDQKKIFAFALQGGDEEDKVQELESLLEQSQTDIVDRLIEIRHAIVLSEIVPVGMTLSEAMIDKYDQHKEDLITLKAVIRNTKDKKKAAKLQAIYDLYVNNRHADLAKAMKLTGIKKRSELLDPEELKKAISSLLDDSPEAVEIKQMLEEKTFLPLQRSNNNGVIPNQLHQVELDEIIKKQSKYYPFLAEKNPDESEEAQKKAPTKLDALLTFRVPYYVGPMITKEEQEAQDGHSFAWMVRRDPQDHEAITPWNFEKKVDKMASATQFIKRMTTKDTYLLGEDVLPASSLKYQLFTVLNELNNLRVNGKKLTSDEKEQVIEGLFKKQKTVKADKFVKYWQAKHIGADIKVKGLSDPSKFNSTMSTYIDFKKIFGDQLNDVNRQNDFEKIIEYSTIFEDRKILEDKLRADFAWLSEEQIKQLCRLRLQGWGRLSDKLLTRLTDADGQNVLERLWNSNDNFVQIVSDPNIKAKIEQENQKLLRDGQSDDAVESILDDAYTSPQNKKAIRQVMRVVHDIVKACDGNVPAKFAIEFARSQEDDPKRTTARVNQMQKIYDQISDEVVSQGVKEQLSGMKSLKDRYYLYFMQGGRDAYTGAKLNIDRLSDYDIDHIMPQSFVKDDSLDNRVLVARAVNNQKSDKVPALLFGNKVVADLGITVREMWDKWQKLGMISKRKLSNLLTDPDALTEYRAQGFIRRQLVETSQVIKLTATILQSEFPDSKIIEVPAKYNSIVRKQFDLYKSREVNDYHHAIDAYLSTIVGNYLYQVYPNLRRMFVYGEFKKFSSNAEESAYDVVRRVKSMNFLDDLLRGTHGDNIYCRSTGEIVFNRNDIISKLKQAYSFKQMLVTQEVFTKKSALFDQTVYPSPERDSKKRSGLIPRKKGMDTEIYGGYSGNKDAYFVLAEAVKEKGHTLQIVGVPIRALNTLKNSANYSEKLLEIIKPQVMFNKDTGKPIKGIKDVKILMDKIPCRQPVLEGESYYMLASSKYRYSLKQISLSQMSMKYILDYIDDPNFNKHEMINIDQQDEKECLLSVYDEILEKMDKYLPLFDIRSFRKKLHDGRDAFIALPVASEEKKPGKVDVIRKVLKGLHANADITNLAELGFGTAALGALVSTGGIKISDDAVFIYQSPTGLFERRVKVSDLLK

SEQ ID NO: 212 - protein, 1430 aa, Lactobacillus delbrueckii jakobsenii DSM 26046
MRNKEKKKGKRKMAKPKDYTIGLDIGTNSVGWVVTDDQNNILRIKGKKAIGARLFAEGKVAAERRSFRTTRRRLSRRRWRIKLLEELFDEEIAKVDPSFFARLHESWISPKDKRKRYSAIVFPSPEEDKKFHESYPTIYHLRDKLMKDDQKHDIREIYIAVHQMIKARGNFLHDESVETYRSGMSSLGGRSERTILSVQILEELNDLFAENEGTEEVELNVASAEQINDILTGDHLNADSQKEISNLLLPSSFPSFDDKAKEKQVKKLINNVATNISKAWLGYKADFSTILNLAKVDKDQKKIFAFALQGGDEEDKVQELESLLEQSQTDIVDRLIEIRHAIVLSEIVPVGMTLSEAMIDKYDHKEDLITLKSVIRNTKDKKKAAKLQAIYDLYVNNRHADLAKAMKLTGIKKRSKLLDPEELKKAISSLLDDSPEAVEIKQRLEEKTFLPLQRSNNNGVIPNQLHQVELDEIIKKQSKYYPFLAEKNPDESEEAQKKAPTKLDALLTFRVPYYVGPMITKEEQEAQDGHSFAWMVRRDPQDHEAITPWNFEKKVDKMASATQFIKRMTTKDTYLLGEDVLPASSLKYQLFTVLNELNNLRVNGKKLTSDEKEQVIEGLFKKQKTVKADKFVKYWQAKHIGADIKVKGLSDPSKFNSTMSTYIDFKKIFGDQLNDANRQNDFEKIIEYSTIFEDRKILEDKLRADFAWLSEEQIKQLCRLRLQGWGRLSDKLLTRLTDADGQNVLERLWNSNDNFAQIVSDPNIKAKIEQENQKLLRDGQSDDAVESILDDAYTSPQNKKAIRQVMRVVHDIVKACDGNVPAKFAIEFARSQEDDPKRTTARVNQMQKIYDQISDEVVSQGVKEQLSGMKSLKDRYYLYFMQGGRDAYTGAKLNIDRLSDYDIDHIMPQSFVKDDSLDNRVLVARAVNDQKSDKVPALLFGNKVVADLGITVREMWDKWQKLGMISKRKLSNLLTDPDALTEYRAQGFIRRQLVETSQVIKLTATILQSEFPDSKIIEVPAKYNSIVRKQFDLYKSREVNDFHHAIDAYLSTIVGNYLYQVYPNLRRMFVYGEFKKFSNAEESAHDVARRVKSMNFLDDLLRGTHGDNIYCRSTGEIVFNRNDIISKLKQAYSFKQMLVTQEVFTKKSALFNQTVYPSPKRDGSKRSGLIPRKRGMDPEIYGGYAHNQDSYFVLAKIEKVKGYTLQIVGVPIRSLEIINKAEDFSTALLDIIKSKVMYNEKTGQPKRGIKNVEILVNKLPYRQPILEKDVSYMLGSSAYKYNVKQITLSRQSMKYILDYIDDPNFTKHEMTMIDEQNERECLLSVYDEILEKVDKYLPLFDGNKFREKLHSARKEFVSLSVDDEASAIEKILRGLHANSEMPSLENLKIKPALGFFQMKNGITLSNDAVLLYQSPTGLFERRVKVSDLLK

SEQ ID NO: 213 - protein, 1363 aa, Lactobacillus diolivorans DSM 14421
MRGNYHIGLDIGTSSIGWAVIDDNAKVMRAKGKTAIGARLYNEGQTAADRRLFRTTRRRLNRRKWRLKLLDEIFDPYITPVDAAFFARLKQSNLSPKDQNRDWTGSMLFPDRTDRKFHKDYPTIYHLRHKLMTEDHQFDIREIYLAIHHIVKYRGNFLNTTPVSSFSVSDVKFDEQFDRLNELYAAVSPDEPFAINGDNSKAIETLLLSDETKKFDKQKQSAKLILSETGDKALDKENTKVATQISKAILGYKTQLDVLLKYDAINSSAWKIELDDENIDDTLPGLLSQLDENRQEMVSIIQNLYAQVTLNQIVPNGMSLSESMIEKYNAHRDHLKLLKQLEDKIDDPKKKKGLEAAYDAYVGKNMKVANQDVFYASVKKNLDDSDLAKQIADLIEAQKFMPKQRTSQNGVIPHQLHQLELDQIIENQSKYYPWLTAANPNPKRIHQAKYKLDELVAFRIPYYVGPLVTPEEQEKSANQVFAWMKRKQPGTITPWNFDQKVDRMASANRFIRRMTTKDTYLIGEDVLPDASLIYERFKVLNELNLVKANYHRLAPAQKQAAYRDLFENQKSISTKKLQNYLVDQGYFTAKPKITGLSDPERFNSSLGTYIDFKEIFGDQVDNPDRQDDYEKIIEWSTVFEDRQIYEAKLRTLDWLTEDQIQALKTKRYNGWGRLSKKLLTGIVDENGERIIDVLWNTNQNFMQVQSQESFAKRIHEANAKQMKVTGVEDILADAYTSPQNKKAIRQVIRVVDDIQKAMGGVAPTSVSIEFTRSEDQNPRRTQSRESQLQNTFKVDAKEIVDSDLVTELETVSKSKKGLTDRLYLYFTQLGKDMYTGDPLNIDELSTYDIDHILPQAFIKDDSLDNRVLVSKAVNNGKSNNVPVKLFGGKMGGFWKELADHRLISKRKLKHLLTDPDTIDKYTMRGFIRRQLVETSQVIKLVAQILGDKYQNDDTKIIEVTAKMNHQMRENFKLIKNREVNDYHHAVDAYLTAFVGQYLYKRYPKLRPYFVYGNFKKFNEDHVSFRYFNFLHELMDENNKRIVEPETGEVVLEREPAIAYMKRVYHFKFMLISQEVYTRRDAMFNQTIYPAKEANRRKLIAIKHGKPVDVYGGYSGSVDAYMAIVRIHDKKGDKYKVVGVPMRALEILNATHDKKDYDAKLKQILVPKFTKVKKSRKTGEITKKVEDFEIVLGKVMYRQLVIDGDKKFMVGSSTYLYNARQLVLSDSSLDTLASKGTLDSDADSKRLVAVYDEIVEKVDKYFPLYDKNAFRSGLHKGRDKYLLLPNRSTFNGAKKVHSGKREILNEILNGLHANATLGGLKDLKISTPFGKMQGQSGIPLSSNTIICYQSPTGLFEHRVSLKDL

SEQ ID NO: 214 - protein, 1356 aa, Lactobacillus farciminis DSM 20184
MTKKEQPYNIGLDIGTSSVGWAVTNDNYDLLNIKKKNLWGVRLFEEAQTAKETRLNRSTRRRYRRRKNRINWLNEIFSEELAKTDPSFLIRLQNSWVSKKDPDRKRDKYNLFIDGPYTDKEYYREFPTIFHLRKELILNKDKADIRLIYLALHNILKYRGNFTYEHQKFNISNLNNNLSKELIELNQQLIKYDISFPDDCDWNHISDILIGRGNATQKSSNILKDFTLDKETKKLLKEVINLILGNVAHLNTIFKTSLTKDEEKLNFSGKDIESKLDDLDSILDDDQFTVLDAANRIYSTITLNEILNGESYFSMAKVNQYENHAIDLCKLRDMWHTTKNEEAVEQSRQAYDDYINKPKYGTKELYTSLKKFLKVALPTNLAKEAEEKISKGTYLVKPRNSENGVVPYQLNKIEMEKIIDNQSQYYPFLKENKEKLLSILSFRIPYYVGPLQSAEKNPFAWMERKSNGHARPWNFDEIVDREKSSNKFIRRMTVTDSYLVGEPVLPKNSLIYQRYEVLNELNNIRITENLKTNPIGSRLTVETKQRIYNELFKKYKKVTVKKLTKWLIAQGYYKNPILIGLSQKDEFNSTLTTYLDMKKIFGSSFMEDNKNYDQIEELIEWLTIFEDKQILNEKLHSSKYSYTPDQIKKISNMRYKGWGRLSKKILMDITTETNTPQLLQLSNYSILDLMWATNNNFISIMSNDKYDFKNYIENHNLNKNEDQNISDLVNDIHVSPALKRGITQSIKIVQEIVKFMGHAPKHIFIEVTRETKKSEITTSREKRIKRLQSKLLNKANDFKPQLREYLVPNKKIQEELKKHKNDLSSERIMLYFLQNGKSLYSEESLNINKLSDYQVDHILPRTYIPDDSLENKALVLAKENQRKADDLLLNSNVIDRNLERWTYMLNNNMIGLKKFKNLTRRVITDKDKLGFIHRQLVQTSQMVKGVANILDNMYKNQGTTCIQARANLSTAFRKALSGQDDTYHFKHPELVKNRNVNDFHHAQDAYLASFLGTYRLRRFPTNEMLLMNGEYNKFYGQVKELYSKKKKLPDSRKNGFIISPLVNGTTQYDRNTGEIIWNVGFRDKILKIFNYHQCNVTRKTEIKTGQFYDQTIYSPKNPKYKKLIAQKKDMDPNIYGGFSGDNKSSITIVKIDNNKIKPVAIPIRLINDLKDKKTLQNWLEENVKHKKSIQIIKNNVPIGQIIYSKKVGLLSLNSDREVANRQQLILPPEHSALLRLLQIPDEDLDQILAFYDKNILVEILQELITKMKKFYPFYKGEREFLIANIENFNQATTSEKVNSLEELITLLHANSTSAHLIFNNIEKKAFGRKTHGLTLNNTDFIYQSVTGLYETRIHIE

SEQ ID NO: 215 - protein, 1353 aa, Lactobacillus fermentum DSM 20055
MMRIKGKTAIGVRLFEEGKTAAERRTFRTTRRRLKRRKWRLHYLDEIFAPHLQEVDENFLRRLKQSNIHPEDPAKNQAFIGKLLFPDLLKKNERGYPTLIKMRDELPVEQRAHYPVTNIYKLREAMINEDRQFDLREVYLAVHHIVKYRGHFLNNASVDKFKVGRIDFDKSFNVLNEAYEELQNGEGSFTIEPSKVEKIGQLLLDTKMRKLDRQKAVAKFLEVKVADKEETKRNKQIATAISKLVLGYKADFATVAMANGNEWKIDLSSETSEDEIEKFREELSDAQNDILTEITSLFSQIMLNEIVPNGMSISESMMDRYWTHERQLAEVKEYLATQPASARKEFDQVYNKYIGQAPKEKGFDLEKGLKKILSKKENWKEIDELLKAGDFLPKQRTSANVVIPHQMHQQELDRIIEKQAKYYPWLATENPATGERDRHQAKYELDQLVSFRIPYYVGPLVTPEVQKATSGAKFAWAKRKEDGEITPWNLWDKIDRAESAEAFIKRMTVKDTYLLNEDVLPANSLLYQKYNVLNELNNVRVNGRRLSVGIKQDIYSELFKKKKTVKASDVASLVMAKTRGVNKPSVEGLSDPKKFNSNLATYLDLKSIVGDKVDDNCYQTDLENIIEWRSVFEDGEIFADKLTEVEWLTDEQRSALVKKRYKGWGRLSKKLLTGIVDENGQRIIDLMWNTDQNFMQIVNQPVFKEQIDQLNQNAITNDGMTLRERVESVLDDAYTSPQNKKAIWQVVRVVEDIVKAVGNAPKSISIEFARNEGNKGEITRSRRTQLQKLFEDQAHELVKDTSLTEELEKALDLSDRYYLYFTQGGKDMYTGDPINFDEISTKYDIDHILPQSFVKDDSLDNRVLVSRAENNKKSDRVPAKLYAAKMKPYWNQLLKQGLITQRKFENLTMDVDQNIKYRSLGFVKRQLVETRQVIKLTANILGSMYQEAGTDIIETRAGLTKQLREEFDLPKVREVNDYHHAVDAYLTTFAGQYLNRRYPKLRSFFVYGEYMKFKRGSDLKLRNFNFFHELMEGDKSQGKVVDQQTGELITTRDEVAKSFDRLLNMKYMLVSKEVHDRSDQLYGATIVTAKESGKLTSPIEIKKNRPVDLYGAYTNGTSAFMTIIKFTGNKPKYKVIGVPTTSAVGLKRVGKPGSESYNQELHRIIKSNPKVKKDFEIVVPHVSYSQLIVDGDCKFTLASDTYQHPATQLVLSKESMEIIADDFKFVKENPATADEQLVRVFDEIVNQMNHYFTIFDQRSNRQKVTKARDKFVSLPTESEYEGAKKTQVGKTEVITNLLMGLHANAAQGDLKVLGLSTFGFFQSSGGLNLSEDAMIVYQSPTGLFERRICLKDI

SEQ ID NO: 216 - protein, 1346 aa, Lactobacillus floricola DSM 23037 A
MNQTKNYDIGLDIGVGSVGWTITDSQSQKVLKVKGKQGIGVHLFNEGQTAEERRQFRTNRRRLKRRKWRLRLLRELFDEPISSIDPEFFARLKYFNESSKDPKNKGYQPQLHDDLKDVDFYRQYPTIYHLRHALMTQKEKFDIRDIYLAIHHIVKYRGHFLMNGHSSSFSVAQTDWKADLTKLFELIQETRTNLDFSFDLTEIDTIKSLLFDKNLSRNDRQKEIVGLINNNSQLDKKDKALTKQLVESVVKGIVGMKTRTDILLGYEVDNKEQSKAWNFSIDELDDQMATIDPALSQNSQAHDIITLIQKLYMTVQLAQIVPEGQSVSEMMINRYNLYAEQLQQLKDYKKINLETGLLLREAYDELMTKALTAAPGKTIHDTFYNKVKKILKDQDNKQALSIKQAIEDSNYLIPLRIKSNGVIPYQLHQRELDAIIENQKEFYPFLATPNPVDGHQEALPYKLDELIGFKVPYYVGPMVDPEVDSDQNFAWMVRKEKGEITPWNFHNKVDITQSADNFIKRMKTTDTYLIGKDVLPQNSLLYQRYTVLNELNGIKVANKKLTIEQKQRLYDQLFKKKKTVKKQDILNNLVAAGEIHEDDNLTGLSNGTTFNNNLGSYIDYCKIIGQDKLEDASKQADIERIIEWSTTFEDANIFLTKLAEINWLTEDQRQKLSQIRYRGWGQFSKTLLTDIKDNKDNSIIDNLMSTKKVFMQIINDTTIKQKIDDYNQYHLNHADLKDTIANLFTSPQNKRAINQTLLVIEDIINAVGHKPNRIFIESAKDNRNAKNQLTQSRLKRIVKQFEDNKQHVDQSVYEELKQLDDGSHASIDDRLLLYFLQNGKDMYTGQPIDISQLSTSQYHIDHILPQAKVMDNALDNRVLVSSKANTEKSDRFLSEIPQFQQRSLWAELERMGFLTKAKKERLLMTSDEFKQNSVRFIARQLVETRQIIKLVNQLIIQEHPEVKLVNIKADLTNAFRKKFNFVKNRNANDYHHAFDAYLTSLIGSHLLKSHPKWEPLFVYSDYDKIKFDNAPQGVNIMKEFEQSKLADENGEIIWNKDEMMAYLERLYNSRQILITKKVYARHGNLFKQTIFKAGESDNLIPVKNNRSDIAIYGGYKSKQVSYYALISLHNKKRQKRLVAVYLIDIQKLQNLNESDYFKTLHTIIKERHNIKPEFDILADKIYQNQLIIDNKNGSNRPFRIEGDFKNDRQLYLPLQYQRWLASKEPTDEKLNRIFDHICEQLADYFPLFAGNACDKLLDNRDKFYQLSIKSEFNDKGKLIAEGKLSVIDKLLVAMHADSRNSNLAVIGLSSSWGRFKLHGGNEAIGTSVQLIHQSPTGLFKRIQRFN

SEQ ID NO: 217 - protein, 1402 aa, Lactobacillus floricola DSM 23037 B
MTYRNYHIGLDIGTSSVGFAVRYDNGELVHKKGSNLVGARLFKEGETAEERRLNRGARRRYNRRKWRLNLLNQIFKPLIEVNDPTFFKRLEQSNLVNYDKSESFSLLNNQSDDKLHQQFPTIYHLRDYLMKSTEKADIRLIYLAVHHIVKYRGNFLDASPVDSFEASNLKVDEILTQINLLLDNLTDDLRLNTQYVTDIEQTLLSNTESNKDKEKVIQKLLLHKEAIKIDKDRTAQIAKLVLGYKADIAKLFGITEKLQTPKLELSAANSDDALMELSAELNEDQIGILLQLKTLYSRVRLNQIIPSGTSLSKSMIEKYELHHTQLKSFKENILLKLRRNTAVRRNLELAYALYVGNAQTKQEVFEPKKARFTSDDFASLKANAKSASSVKEAPKNTKTKLTTDDFYNILTELFATFESELSADEDMIKEVEQIKKAITGDNYLPKQRTDQNGNIPHQLHQIELRQILQNQLPHYPEMDKINEQKPIEKLVTFRVPYYIGPLITPEDQQKSSAANFAWMKRKEQGAITPWNFDDKVDRMQSATNFIKRMTVKDTYLINEDVLPDRSLLYQRFKVLNELNLVKVNNQLLSIGEKQAIYHDLFEKQKTVSTKKLQSYLQSEQGYGDNIEISGLSNPDKFNNGLTTYIDFKNIFGDLVEDTTKQKEFEQIIEWSTVFEDRAIFKAKLQEVNWLTEEQIKALVAKRYSGWGRLSYRLLAELVNDNGERIIDILWNNKGSNLMSIVSQDEFQQQIARINSHEVQELGMESVLANAYTSPQNKKAIRQVMKVVDDIQLAMNGQAPTSISIEFTRKPEENSEISKSRYETITSIYQSLSKDIEKEVKDNLNKNKSSLKKNLSDKYYLYFTQLGRDIYTNQPIPFNEIPYYDIDHIVPRSVEMNDSLNNRVLVAKSINQIKKNNAPIDSSLKITSETRQLWKKLLDSGLITKQKYYKLSSSIKNTVSPYVKQGFINRQLVETSQVIKLVANILGTKYQNDDTEIIEVKAHLNSEIRKTFEFYKLRELNDYHHGFDAYLTTLVGGYLYNRYPKLRSYFVYGDHKRLDKAQLSELKNFNFLHGLTNPKSGSDGLITASGSQQVVLDRNETIKRLNKIYRYKYMLISREVFTKQGQFYNETIYPAKPNTAKMIPLKDNKPSEVYGGYSSSNVSKIALIKEKNTDNYQFIGIPIRSIAKLKQAKANSKTVYQTELNRVIKSVLASQKTKKQKEFEVILDNVKYNQVVVDQGEKYYLGSPYYKKNAKQLVISPESVKILADKATADLPEQEAHNKLMTVYQEIVDVLNKHFALYDINNVRKKLNDGLIKFSQLPNYDETSKNRFDISKSIKTKYAVIMRILSGIKNQTSEVPELGLKSPLNKMQTKGGIKISPEAKIYYSSPTGIFSHFKQVKNL

SEQ ID NO: 218 - protein, 1364 aa, Lactobacillus fuchuensis DSM 14340
MNKRYNIGLDIGTNSIGWSVVNDQSQLVRIKGKLGYGVRLYDEGQTAEDRRLFRTTRRRLKRRKWRLGLLREIFEPYITPQDATFFLRQKQSNLSPKDLQKQQPQIGLFNDRLDSDFHYQYPTIYHLRYALMTEKRQFDLREIYLAMHHIVKYRGHFLNAAAASSFKSGEIDLAKDFAALNQIFGTIFSEVGFSLSESNLDEIKSILLDNNLSASVRQRKALPLIYQTAASKDSEKQYKAIATELLKAILGLKAKFNLITGIEVEDVKAWTLSFNAEDFDAKLSDLNIADNDDAVQIIEILRALYSGVLLTGIVPEGQSISQAMIDKYEAHKAHLIMLRSIREQLSDKENKALEKAYDDYIDHPEDKQHGSREDFYAAITKVLKKDSEDTNIIEILKLIELDQFMPKQRTKDNGAIPHQLHQQELDQIIENQKQYYPWLADINPNEQRQKMAPYKLDELVTFRVPYYVGPMITAEEQFQTSNKKFAWMIRKEPGAITPWNFDQKVDRQASANEFIKRMTTTDTYLLAEDVLPKQSLLYQRFEVLNELNGIKIDDQPITVEQKQAIFNDKFMQQAHVTVKNIQAYLVSEGQYASRPNITGLSDGEKFNSSLSTYHDLKKIFGDMIDDPNKQTDFEKMIEWSTIFEDGKIFADKLREINWLTDEQRQRLSNKRYRGWGQLSTKLLTKIVDQNGQRIIDILWNTNDNFMRIIHSDDFDQAVTQANQMLLADNDTQDVINELYTSPSNKKALRQILLVVADIQKAMKGQAPARILIEFAREKQANPRLSTQRRRQVEQVYQELNNDQLNKELADPQYANLSKDRLFLYFMQGGRDMYTGESLNIDRLSEYDIDHILPQAFIKDNSLDNRVLVSAKMNRSKSDHVPLDFTEERFGQKMRSQWEQMLRAGLLTRRKYNNLTLNPDSLNKYTMSGFINRQLVETRQVIKLATNLLVDQYADEDVQLVTVKSGLTHQMREDFDFPKNRNLNNYHHAFDAYLTAFVGLYLLKKYPKLAHYFVYGQYQQGFKANDQWRNFNFLNGLRQEQQVDAETGELIWQKDHDLAYMNKIYDFKKILVTREVHTNHGALYNQTLYKAKDDKASGQGGRQLIAAKENRPTAIYGGYSGKTVAYMCLVRITEKKGDFYRICGVQTAWVDELEHIEDATIKLQRLTALLTPQFSATKKQKDEVVTVVKPFEVLLPKILINQRFYDGGQELTLASATYKNNAQELVLDKKAVQVLNGQLPKAELEAQATVVYDQILERVQKYFPLYDMNSFREKLFVGRDKFNELPWQDQWENHKLIQVGQKTILDRILIGLHANAAMGDLKALNMSTPFGKLQKSNGISLSPETQIIYQSPTGLFERRVALKDL

SEQ ID NO: 219 - protein, 1129 aa, Lactobacillus futsaii JCM 17355
MADRISLGLDIGVASVGFSVLDIDKGKVIELGSRLFNATVAEGNQDRRSMRGARRLLNRNKQRRQDTGKLFQKFGLLDNFNKDNFYDTFNQNWNPYELRVKGLTEHLTKKELAESLYQIVKHRGISYALKDADADEGGTDYSASLKINSQELAEKTPAQIQLQRLNDYGKVRGQVVIGDDPDNQKVLLNVFPTSAYEKEAKQIIATQKQFYPEILTDEFTKEYCKILTRKRDYFVGPGNEKSRTDYGIYKTDGRTLDNLFEELIGHDKIYPDELRASAASYTAQLFNVLNDLNNLRILSYEDGKLTKEDKEKIIAEIKSNTTTINMLNVIKKVAGCSKEDIKGFRVNEKDKPEISSMAVYRKVHKDLLKVGVDISDWPVEFIDKLSFILTLNTENGEIRKQLNNRLVPEFDFLNDDLIQLIIDNKDSFEIKTNNKWHRFSLKTMNKLMPEMLERPVEQMTLLNEMGLVKKDKKRFENNKYLPYKEIAKDIFNPVASKSVREALKIVNAVLKKYGHIDYLVIEMPRDKNLKEEQDNIKEFQNKNKKAKDAAFEAFVKSVGSEQRVKEALSKNRKLQMKMRLWYQQQEIDPYNGETIDATDLINNPDKFEIDHIIPQSISFDDSINNKTLCFASMNQVKGQKTPYEFMLEGHGQGYDKFKATVLDNKNFDRNKRKNYLFEENVSDIETRKRFLSRNLVDTRYSSRVVLNSLQDFFHEKSADTKVTVIRGKFTSNMRKHWHIDKTRETFHHHAIDASIIAATPFLRMWKKGGTIFPVKVGEESIDIETGEILDDKKFDKVMYEEPYNGFVSEIMNADDRIKFSHQVDKKMNRKVSDATIYSTRTGKLAKDKKDAEYIVAKVKDIYSVDGFKKFKKVYDKDKSKFLLYKYDPRTFSELERIISDCPDKVEKVQTNGKVKAVDVSPFEMYRRYHGMIKKYSKKGNGPAIKQLKYLDKKLGSHIDITPANANGKHVILQSLKPWRTDVYLNHETGEYEIMGIKYSDLKFNKNVGYGIKKDKYLEIKKNEEVSEKSEFMFSLYRKDRVRIQNMKTGESVELLFWSRNFSNKKYAELKPIFKFVTEDDDWPVYGHAKTQILKRLVPKDCKIWKVNTTILGDPYYLEKESDNPKDILD

SEQ ID NO: 220 - protein, 1386 aa, Lactobacillus gasseri K7
MTKIKNEYIVGLDIGTNSCGWVAMDFQNTILRMHGKTAIGSHLFDAGNSAADRRAFRTTRRRIKRRKWRLKLLEEIFDPYMTEVDPYFFARLKESGLSPLDKRKNASSIVFPTALEDKKFYCNYPTIYHLRYDLMSEDKKFDLREIYLAIHHIVKYRGNFLYNTPVKDFEASKIDVKDSLEKLNELYERLDSEFTVELDSSNALEIEKIIRDKNVFKINKVKSIHQLLSLKTENKERTKLIKDVSKQIINAILGYKTKFETILLKNISKDEADDWEFKLTDVDADNKFENLIGDLNENEQEILLVIRNLANAITLSNIVEEGKTLSESMIDKYNKHSDDLKLLKQVISDHPDRDKAKKLALAYDLYVNNRHGKLLQAKDVLGSKKTLSKEDFYKEVKKNLDDSKASQEILDAIALDSFMPKQRTNENGVIPYQLHQLELDRIIKNQGKYYPFLKEANPVSSHLKQAPYKLDELIRFRVPYYVGPLISPNESTKNKQTKKNQNFAWMIRKEQGQITPWNFDQKVDRMASANKFIKRMTTKDTYLLGEDVLPANSLLYQKFTVLNELNNIKINGKRISVPLKQELYNNLFKKNSTVTTNKLKSYLKENYNLINVEIKGLADEKKFNSGLTTYNKLRNLKIFDQQIDDLNYDKDFERIIEWSTIFEDKAIYKDKLKTIKWLSDRQIDKLSKIRMQGWGQLSKKLLSQLTDNNGQTIIEQLWDSQNNFMQIVNQADFKDAIAVANQNLLVNTSVEDILNEAYTSPANKKAIRQVVKVVDDIVKAASGKVPKQIAIEFTRDADDKAKISQTRANKLRKVYKELSNELASEAIRNELERVAKDQKLLKDKYYLYFMQLGRDAYTGEPIDIDELEQYDIDHILPQSFIKDDSLENRVLVKKAVNNGKSDNVPVKLYGNHMAADLGITIRHMWEKWKDQGLITKTKYNNLIIDPDKINKYESSGFIHRQLVETSQIIKLASTILQSKYPDTEIIVVKARYNHYLRKHLNLYKSREVNDYHHAIDAYLSAICGNLLYQVYPYLRPFFVYGQYKKFSSDPKKEKIIYDKTRKYNFISQIFENKGNDIISLETKKKVFDKKDIIEKLKHAYDYKYMLVSRETETRDQEMFKMTVYPRLSRDTKKSRNLIPKKKDMPTEIYGGYTNNSDAYMVIARINKKKETEYRVFGVPMRELVNLRKAEKKGHYNAYLKQVLEPEIMYNKNGKKNKTISSFEIVKSKVPYKQVILDGDKKFMLGSSTYVYNAKQLTLSQDAMQAITDNCENDTDEEKALIEAYDEILTNIDKYLPLFDINKFRDKLHAGREKFINLSLDVKKDTILQVLNGLHDNAVMPKIKSLGLSTELGKLQIPTGVKLSENAKLIYQSPTGLFEKRVKISDL

SEQ ID NO: 221 - protein, 1368 aa, Lactobacillus graminis DSM 20719
MKRSYNIGLDIGTNSIGWAIVDDQSKLISVKGKYGYGVRLYDEGQTAAERRSFRTTRRRLKRRKWRLGLLREIFEPYITPIDSTFFLRQKQSNLSPKDQRKLYPQTSLFNDRPDADFYQQYPTIYHLRYQLMTEKRQFDIREIYLAMHHIVKYRGHFLNEAPVASFKSSEINLAEHFDQLNTIFADLFRESGFQLETDELVAVKALLMDNQQSASNRQRKALPKLYTPSADKSIEKQRKAIATEILKAILGLKAKFNVVTGIEAEDVKAWALTFNAENFDEELAKLESSLDDNGHEVIGILQELYSGILLAGIVPENQSLSQAMITKYEEHQAHLKMLKAVRDDLATADQQKLKKAYDQYIDGQENTKAYSKEAFYDDVTKALKDYSEQPLVSEIQKLIELDQFMPKQRTKDNGAIPHQLHQQELDRIIENQQQYYPWLAELNPNPKRQTVAKYKLDELVAFRVPYYVGPLITAEQQQQSSNAKFAWMIRKTEGRITPWNFDDKVDRQASANEFIKRMTTTDTYLLAEDVLPKQSLIYQRFEVLNELNGLKIDDQPITNELKQAIFNDLFMQKTSVSVKNIQDYLVSEKRYASRPAITGLSDEKKFNSRLSTYHDLKVIVGDAVDDVDKQADLEKCIEWSTIFEDGKIYSAKLNEITWLTEQQRGQLATKRYRGWGRLSAKLLTQIVNANGQRIMDLLWDTTDNFMRIVHFEDFDKLITEANQMVLAENDVQDVINDLYTSPQNKKALRQILLVVNDIQKAMKGQAPERILIEFARGAQKDKSLTVRRKRKLDEMYSQISDAVLADESVRQELKSSNQDDLVKEKVYLYFMQGGRDLYTGNALNIDRLSDYHVDHIIPQAYIKDDSLDNKALVSSRMNEIKADRVPLQVVQKQFGKNMASEWGYMHRAGLISRKKYDNLMFNPENLNKYQINRFISRQLVETQQVIKLVANLLSNQYEGDNVKIITVKSKLTQTIRSEFDFPKNREVNNYHHAFDAYLTAFVGMYLLKRYPKLSSYFTYGEYLKGNQQDKWSSFNFLNDLKRAKLEDKTNKEIFWHKESGLAYLNKIYQFKKILVTREVHENSGALFNQTLYAAKDDKASGQGGKQLIPAKQARPTALYGGYSGKTVAYMCIVRIKNKKGDLYKVCGVETSWLAQLKQLKDEDSQKAFLKQKISPQFTKAKKQKGTIVKVVEDFEVIAPHILINQRLFDNGQELTLGSATYKHNEQELILDKTAVKLLNGELPLAQSEELAELVYDEILDQVMHYFPLYDTNQFRAKLLAGKTAFMQLPWKSNPDDNKTVQITQPIVLKKILQGLHADAGRVSLKELGMTTDFGMLQKATGITFTPDTQIIYQSPTGLFERRVALRDL

SEQ ID NO: 222 - protein, 1362 aa, Lactobacillus hammesii DSM 16381
MNQEPYAIGLDIGTSSLGWANADMDGYIARVKGQTGLGVRLFEEGQPAADRRSFRTTRRRLSRRRWRLRLLREIFDEPISSIDPNFFARQKASSISPKDDRFETTYQLFNDKTDQEFYSKYPTIYHLRWALMTEHRKFDLREIYLAVHHIVKYRGNFLRSGNPKSFKPSELDFSQRFKEVNGLWHLIFDEVAPQLPTDNLEEITKLVLDTTRTRADRQRESVKLLMAATDNHKDWKPYLTEFTKAILGLKTKLYLLTGVDVAKADQKTWTFSLEDIEDHRADLETAFDDRSLELIEKLVDLQAAIQLTEIMPSGQYFSQSMIYRYDQHKEHLRWLKDYAEQQTDANKRKAVRLAYDHYIEGDAKGKPEIADDFYKELNRILKGDTSELAKKINHEIALEHFMPKQRTKENGVIPYQIHQQELDSIIDNQKKYYQFLGEDNPVVSHHGSQPYKIDELVSFRVPYYVGPMITADQQKKTAAGQFAWMVRKDSGDITPWNFDDKVDRTASATNFIQRMKTTDTYLIGEDVLPLQSLTYQKFMVLNELNNIRINGELLTREQKQRTYNDVFKGHGTVNVKSLIKSLECHSEVTGAIKVEGLADPKRFNSALTTYRDFKKILPVAIDQPQRQADIERIINWSTIFEDADIFKAKLQEIDWLTDTQRDRLSTKRYRGWGRLSAKLLLNIKDTQGLSIMDQLWNTQHNFMQIVHEPDYAEKIEKTNAKGLKQQDIFETINEMYTSPQNKKALRQILAVVRDIQKAHHGQAPSRIFIEAARGAEQNPQRTRQRQKQLADLFADQAKEIVNETVAQELNDETDNKARFTDRLMLYFLQNGQDMYTGEKLNIDKLSTYDIDHILPQSLVKDDSLDNRVLVSKVENLKKNDHFASELYARKMQGTWELWRSAGLISARKLKHLLMRPDEINKYATGFIRRQLVETRQVIKLVTDVLSNEYDSDKTKIISVKAGLSHQLRMELDLPKVRELNDYHHAFDAFLAVRIGTYLLKRYPKLERFFVYGQYQVAPQLDLRRFNFIHDLVSGKQEKIVAEETGEIVWNREKDVSYMKHLLSLKHLLVTHEVKEDHGALFNQTIYKAKKDNGNVGGKMKLLPTKSNRPTEIYGGHSSQAIAYLAIVRVNGKEPSYRVMGVPIRILDQLKQAKKQGEYAERLALKQFFTPDFTKGKGKIVSDFDVVIPHIPLLQPVIDEISGQSHRFALGTNTYYRNLQQLILTLADQKVLISKETGVDEEKKLVEVYSHICQQVMKFFPLYDRNKFRELLVDSRSHFEQLPIVNRYSDAGKLEIAGKRGILQQIMVGLHANATPGDLKELGVKTPFGKLQVPGGIKLTENAKLIYESPTGLFKREVKITTE

SEQ ID NO: 223 - protein, 1386 aa, Lactobacillus hominis CRBIP
MTKITEDYIVGLDIGTNSCGWVAMDSKNTILRMHGKTAIGSHLFDAGNSAADRRAFRTTRRRIKRRKWRLKLLEEIFDSHLAKVDPYFFARLKESGLSPLDTRKNVSSIIYPTSLEDKKFYVDNPTIYHLRYKLMTEDRKFDLREVYLAIHHIVKYRGNFLYNTPVKAFEASKIDVKGSLKKLNELYEGLDSEFNVELDSNNALEIENIIRDKKIFKINKVKEINQLLSLKTEDKERTKLMKDVSKQIVNAILGYKTKFETILLKDVSKDEADDWEFKLTDVDADNKFENLIGDLNENEQEILLVIRKLANAITLSNIVEEGKTLSESMKDKYKKHSDDLKLLKQVISDHPDRDKAKKLALAYDLYVNNRHGKILQAKDILEKKKTLSKEDFYKEIKKNLDDSKESQEILDAISLDSFMPKQRTNENGVIPYQLHQLELDKIIENQGKYYPFLKEVNPVSSHLKQAPYKLDELIRFRVPYYVGPLISPNESTKNKQTKKNQNFAWMIRKEQGQITPWNFDQKVDRMASANKFIKRMTTIDTYLLGEDVLPANSLLYQKFTVLNELNNVKINGKRISVPLKQELYNNLFKKNSTVTTNKLKSYLKENYKLIKVEIKGLSDEKKFNSGLTTYNKLKNLKIFDQQIDDPNYNKDFERIIEWSTIFEDKAIYKEKLKTIDWLSDRQIDKLSKIRMQGWGQLSKKLLSQLTDNNGQTIIEQLWDSQNNFMQIVNQADFKDAIAVANQNLLVDTSVEDILNEAYTSPANKKAIRQVVKVVDDIVKATSGKVPKQIAIEFTRDADDNAKISQSRANKLRKVYKEMSNELASETIRNELERVAKDQKLLKDKHYLYFMQLGRDAYTGELIDIDNLEQYDIDHVLPQSFIKDDSLENRVLVKKAVNNGKSDNVPVKLYGNRMATDLGMTIRHMWEKWKEQGLITKTKYNNLIIDPDKINKYESSGFIHRQLVETSQIIKLVSTILQSKYPDTEIIVVKARYNHYLRKRLNLYKSREVNDYHHAIDAYLSAICGNLLYQVYPYLRPFFVYGQYKKFSSEPEKEKIIYDKTRRYNFISQIFENKDNDIISRETKKKVFDKKDIIEKLKRAYNYKYMLVSRETETHDQEMFKMTVYPRLSRDTKKSRNLIPKKKDMPTEIYGGYTNNSDAYMIIARINKKKGPEYRVFGVPMRELVNLRKAEKNGHYKAYLKQVLEPEIMYSKNGKKNKTISSFEIVKAKVPYKQVILDGDKKFMLASSTYVQNAKQLTLSQYSMQAITDNCENDTEEEKALVEAYDEILTNIDKYLPLFDINKFREKLHAGREKFVDLPLAEKKETILQVLNGLHDNAVMPKIKSLGLSTPLGFMQFHTGVSLSENAKLIYQSPTGLFEKRLKISDL

SEQ ID NO: 224 - protein, 1371 aa, Lactobacillus hordei DSM 19519 A
LLYRGRYSVENNRYNVGLDIGTSSIGFAVTDEQDELVQVKGKNYIGVRLFKEGQTASERRSFRTTRRRLKRRKWRLGLLEEIFAPYLAQGDPYFLARMKESNISPRDERKKYYGSLLFSDDTVFYDKYPTVYHLRHALMTEDRKFDIREIYLAVHHIIKYRGNFLINTLINEFSSKAVDFKKDADILNDLFEQFYISDINDSFQLNTADMNEISELLLDNSKTRLDRQRESLKKLAKKVDDISVAKKHQKIATEFSKAILGNKAKFDVILNVTTDSSNDWSFKLEDEDADEKIVVLLEELNTPQQEALNIIHQWYSQISLNGIVPDGKSISEAMISSYELHKEHLALLKQQINNTKDKKKAHGLHEAYNEYVHGNNNKKLNQADFYSKVKQNLESSLITDEILELINAENFMPKQRTSANGVIPHQLHQQELDRIIQNQAKYYPFLAETNPNEKRSKVAKYKLDELVAFRVPYYVGPLITATDQKKTSGKEFAWMVRKQPGRITPWNFDEKVNKMESANTFIRRMTTKDSYLIAEDVLPDESLLYQKFKVLNELNNLRADGRKLKVSVKQKVFKELFQQQKTITIVKLQNYLKAECSFLTTPEISGLSKPEHFVSSLATYIDLKKIFGEDIDNPARQNDFERMIEWATIFEDKNIYSEKLNEIKWLNDRQKKELKNKNYHGWGKLSAKLLKGLRDSDECSIIEHMWNTQQNFMQVQAEEDFAQRIQEENNQHLKGNTLEEVLADAYTSPQNKKAIRQVVKVIEDIQKAMGGIAPQKISIEFTRAPEEKPRRSVERQQQIEKIYKSVANEVENAGVKDELQRFSDRKQTLTDKYFLYFTQLGKDMYTGKSINIDQIGNYQIDHILPQAFIKDDSLDNRVLVSAAVNNGKSDNVPTKNDRYKVREHGQRLYDQGLISKRKFNNLITDPDSINKFTARGFVKRQLVETSQVIRLVAEFLYNKYQSKSEIIEVRAKMNSQLRKDFGLIKNRNVNDYHHALDAYLTTFIGNYLYRRYPKLRAYFTYGCFKKVDDSQLKYFNFLHDIEDDKKKIIKDNDTGEILWHRDEGIARFKRIYNFKYMLVTHEVLTRQGAMFKQTVYSAAVAGSKKLIPVKEDRPIDIYGGYTNNNDAFLAIVKVTKKKQYMVVGIPQRAVVKLNDAAKQGSKAYQKVLYNVIKPQFIKKKKDRKTGKITQKLENFEIVVSKTLYRQLIIDGDQKYMLGSSAYKYNAKQLVLSEYALEVLDRSIFEKKEYTTVDLDNVYDEILAQVDKYFSLYDKNKFRQKLHESRKIFTELPINNLFSGTKLLKSGKRETLNEILEGLHANATKKDLKSLKFSTPLGMIQYPSGIILSENAILCYQSPTGIFERRVTLKDL

SEQ ID NO: 225 - protein, 1170 aa, Lactobacillus hordei DSM 19519 B
MSKYNVGLDIGIASVGWSIVDADKKKIIDLGSRIFSSGNAAANQERRGFRGTRRLIRRRKNRLTDVINFFGEKKFIDTKVVDKNGHVHYKFSVNNTESPYELRVKGLSEILTKQELVIALYHIVKHRGISYDLGDLEDDGTSGVTDYKTSININRQLLNEKTVGQIQLERLNEFGKVRGQVEENENVTLLNVFPSAAYVKEATQILTKQREFYPEITDDFIAKFMLFITRKRDYFVGPGNEKSRTDYGIYKKDGRTLDNLFDELIGIDKINGEKRASASSLTAQIYNMLNDLNNLTVPNTEDGRLTIQTKKEILEAAKTTNGLFGIAQICKIIGCKKDDIKGFRIDKSEKKIMHTLSGYRKFRKELADVNIEANDLNINLVNKIADILTLNTEKAEIRKQLDKSNMDISNEMKEIVINKNKEFLVDGRATWHSFSYKTLNLLIPELLNTPEEQMTILTRLGLVKPNNKKYEGLKNIPARRITEEIYNPVVARATREAVNVFNAITKKVGRDNIKDVIIELPREDNEVDIKKGIVKRQKQNEVEKETADALVKQHMTISDSALIAQYRKIRGLSQKVRYWYQQDTICPYCGKKIEAVQLINNNDSFEVDHIVPISVSFDDSQNNKVLVHSQCNQAKEKQTPLGWLNNGGGFGQSKADYIARVKSNKNYAKNKIDNLLNETDLNDIATQRGFIQRNLNDTRYASRIVLNEFYSFFRSNNLSTKVKVVRGKWTSQMRKKWNGVGGLSKTRDTYHHHAIDACIIACFPLLKAFDKAIKLIDVDGETGEILQDKKAIKLAQEAEIVEKISVIKNKKFENMVNEIYNFPLFKQVELANDITNLENPVKFSHHVDKKANRAVANQTIYGTRIKEKEVTKRGKKEKIQERYTLGTIKNIYDIDGFMNFKKLYDKISKNDDVKFLMQKNDPKTWEKLIDIFNSYPDSEEVTQVDGKVKRVAVSPFKLYYRENGFITKYSKHNDGPKVVSIKYYDSKVGSHIDITPKDARNKVILQSLKPWRTDVYFNSITQQYELLGLKYSDLKFTNGVYGITRDAYEKLKHGVSEDGVTAWKPISKNSEFRFSLYRNDRVRVIDEKGDSIELLFASRTTSNEGYVELKPIYKAKFDSKEEVGFYGLVSNGRLIKKMSKGGYKLYKVNTDILGKPYYVTRESDEPKLSL

SEQ ID NO: 226 - protein, 1395 aa, Lactobacillus jensenii DSM 20557
MKEIKDYIIGLDIGTNSCGYVVTDKQNNILKLKGKTAIGARLFKEGQAAADRRSFRTTRRRLARRHWRLGLLEEIFDPEMEKIDPNFFRRLKESDYSPKDSRKQFNAIVFKSIKADKRFYKKYPTIYHLRNALMHDNQKHDLREIFMAVHHIVKYRGNFLREDSVNAFKAAKFSLRGEDGIGPVDKLNDLLKEIYSEYSPELATNNLSKIEDIIKDKNLYKQDKLKQVATLLIKEADSKDKAKLNKDIAKQVANSFMGYMFRLDTLFSLTDVDVKDYKLKFSDANIDESLDDLTSLLTDAQIEFVLELQSIYNTIVLNEIVPDGMSLSESMIKKYDDHKEDLKIFKEYIDSLSDQKKAKKLLSAYNLYVNYRKSDLVEAKNLFKNKKVGDKNFADVISNFEVFGKFVSDNLDDSELANKIKARLDLGEFLPKQRTNQNGVIPYQLHQVELTQILEKQGKYYPFLITPNPVESHRNNAPYEISELVSFRVPYYVGPLIDNQSIKDKQNKNKFAWMVRQKQGQITPWNLEEMVDTTESANQFIKRMTRKDTYLLAEDVLPKSSLVYQKFMILDELNRIKIDGKKLTSELKHDIFEKLFKKQKSINLDNLKNYLLVEGNIPGLIEGLSDGINFNNSFSTYIDYRNIFGDEIDNPNKQADFEKMIEWSTVFEDRKIFKRKLKEITWLTSEQIKQVSSKRYSGWGRLSKKLLTQITDENGVNILQRLWNEPETLTEVLANPVIKRKIVEANSSFTKAKDMKDILVEAYTSPQNKKAIRQVMRVVDDIIAAAHGKKPSQIAIEFAREDQDNPQMTKSRKAQLDQIYAKISDEFLDDAVKNELKNMKDNKPLAKDKVFLYFKQMGRDAYSGEKLSLDNLQDYDIDHIYPQSFIKDDSFDNRVLVQRAYNNGKSDNVPVLLFGNKIAAGLGITIRQMWKKWLELGLISKRKFNNLITDPEKISRNMASGFVNRQLVETSQVIKLVANILQAKLPDTEIIEVKASYNSILRKEFNLYKSREVNDYHHAIDAYLTTIVGNYLYQVYPKLRPYFVYGQFKKFGKAENQEDDPVKKIKKFNFIYQLIWGKDDAICISHTNQQVFSKKDIIDKLTTAYNFKYMNISHAVYTRNNNMFKQTLFPIIERTTAKTKSLIPKKLDRPTDIYGGYSNNNDAYLALVKVDKKRGSEYRVVGIPMRAAAMLKASKNYDEDLRKVIEPMVMFDKNGKAKRGIEGFRVLVGKMPFKQAVLDGNKKFMLTGTVDTPNLKQLVLSQQNMKYILDYIEDVDCRKHKFGDKVQNPDKCLLEVFDEIIEIVDKYFELFDSRDFREKLRNSRNKFIKLEASKKADTILAILKGLQAKSTRATIKELNISDFGRIITSSISPEAQLIYQSPTGLFERRVKVKDL

SEQ ID NO: 227 - protein, 1375 aa, Lactobacillus johnsonii DPC 6026
MTKIKDDYIVGLDIGTDSCGWVAMNSNNDILKLQGKTAIGSRLFEGGKSAAERRLFRTTHRRIKRRRWRLKLLEEFFDPYMAEVDPYFFARLKESGLSPLDKRKTVSSIVFPTSAEDKKFYDDYPTIYHLRYKLMTEDEKFDLREVYLAIHHIIKYRGNFLYNTSVKDFKASKIDVKSSIEKLNELYENLGLDLNVEFNISNTAEIEKVLKDKQIFKRDKVKKIAELFAIKTDNKEQSKRIKDISKQVANAVLGYKTRFDTIALKEISKDELSDWNFKLSDIDADSKFEALMGNLDENEQAILLTIKELFNEVTLNGIVEDGNTLSESMINKYNDHRDDLKLLKEVIENHIDRKKAKELALAYDLYVNNRHGQLLQAKKKLGKIKPRSKEDFYKVVNKNLDDSRASKEIKKKIELDSFMPKQRTNANGVIPYQLQQLELDKIIENQSKYYPFLKEINPVSSHLKEAPYKLDELIRFRVPYYVGPLISPNESTKDIQTKKNQNFAWMIRKEEGRITPWNFDQKVDRIESANKFIKRMTTKDTYLFGEDVLPANSLLYQKFTVLNELNNIRINGKRISVDLKQEIYENLFKKHTTVTVKKLENYLKENHNLVKVEIKGLADEKKFNSGLTTYNRFKNLNIFDNQIDDLKYRNDFEKIIEWSTIFEDKSIYKEKLRSIDWLNEKQINALSNIRLQGWGRLSKKLLAQLHDHNGQTIIEQLWDSQNNFMQIVTQADFKDAIAKANQNLLVATSVEDILNNAYTSPANKKAIRQVIKVVDDIVKAASGKVPKQIAIEFTRDADENPKRSQTRGSKLQKVYKDLSTELASKTIAEELNEAIKDKKLVQDKYYLYFMQLGRDAYTGEPINIDEIQKYDIDHILPQSFIKDDALDNRVLVSRAVNNGKSDNVPVKLFGNEMAANLGMTIRKMWEEWKNIGLISKTKYNNLLTDPDHINKYKSAGFIRRQLVETSQIIKLVSTILQSRYPNTEIITVKAKYNHYLREKFDLYKSREVNDYHHAIDAYLSAICGNLLYQNYPNLRPFFVYGQYKKFSSDPDKEKAIFNKTRKFSFISQLLKNKSENSKEIAKKLKRAYQFKYMLVSRETETRDQEMFKMTVYPRFSHDTVKAPRNLIPKKMGMSPDIYGGYTNNSDAYMVIVRIDKKKGTEYKILGIPTRELVNLKKAEKEDHYKSYLKEILTPRILYNKNGKRDKKITSFEIVKSKIPYKQVIQDGDKKFMLGSSTYVYNAKQLTLSTESMKAITNNFDKDSDENDALIKAYDEILDKVDKYLPLFDINKFREKLHSGREKFIKLSLEDKKDTILKVLEGLHDNAVMTKIPTIGLSTPLGFMQFPNGVILSENAKLIYQSPTGLFKKSVKISDL

SEQ ID NO: 228 - protein, 1341 aa, Lactobacillus lindneri DSM 20690
MTQKVIPYNIGLDIGTNSVGWAVTDNENKLLHIKGHNGIGVRLFKEGQSAAERCGFRTTRRRLSRRKWRLRLLNEIFADKIAKVDPSFFARLKQSNVSPKDPNKTMFGNILFDNGNLNDKSFHDEYKTIYHLRQSIIDHPEKKFDIRLIYLAMHHIIKYRGHFLNQANVQDFKGGKIDLEESFKDLNSIFENQGRDLRLVTEDANKYVKELSDNSKTRNDRQKELSKVLYIPIDKNSDKNNKKVTTEIIKAILGMKAKFDVIFGIDAENAKEWSLTFNSDDFDDKIEGLSAQMTDEAGEILLILKELYFALNLSDILNNSVTDKNAKTLSEAMINRYDDHKEQLTMLKQVIDNSDKKHAKALKAAYSAYIDGENNKKISFEDLRKRIQKNLDNSETSKKINDLLEHDYFLPKQRSKENGAIPHQLQQQELDKIIESQKHYYPFLAELNPNEKRSRQAKYKLDELVAFRVPYYVGPMVKATENNQSNNGKFAWMIKNDNISDKLKKEEITPWNFDKKVDRTETATKFITRMTTTDTYLIGEPVLPKNSLLYQKFVVLNELNNLKINKQPITPEQKQYVYEHVMKQTKRVSLKKIADALVIKGDYPYAPEITGTTDQKNMNNGLSTYIDLAKIFGDELDDIDRKEDFEKIIEWSTIFEDQHIFALKLKEIKWLTEDQRKQVVKLRYQGWGKLSKKLLADLVDDNGQRIIDLLWDSKQDFMQIVNQNSFKQAIAEHNGAHLEEKDLKDIINNLYTSPQNKKAIRQVILVVDDIIRAVGYEPVNIMMEFAREDSKDHRLTNSRSRQLEKVYKDITNSWFDDDNVKDELKDKIKDKAKFTDRLYLYFTQGGKDLYTGEPLDIDNLSNYQIDHILPQSFILDNSLDNRVLTSKINNQIKKDNLPGEFFGSKMHNFWKHLKELHLISNKKYYNLTLTPNSISKFNNQGRFINRQLVETRQVIKLAAEILHNRYSEENGTNIVTVKANLTHHMREKFNFYKNRNVNDYHHAFDAYLAAFVGNWLLQQYPKLKPYFVYGDFAKTEIDNLKSFNLIYKFEQAHQLNEEDGKIAKDTDALLGYMKNVYHFKKMLVTKELETNHGNLFKQTLYPSHGKMKNLINPKENRSSDIYGGYSSETGAYVSLIKVFKKNKIENKIIKIPLLYIDKLNRQANAKQFIRNFIIKDDSNKFDILSEKIFLNQLVIDGDELFTISGSGDRQNAQQLILSDKSLKILSKNINVISKNDLIIIFNEIIDDICKYMKMYEVENSDETKAKFEEINDKDRMLKIINDLLLGLHANASRSNLSSIGLSPSFGRFFSGNAGIKLSENAKFIYQSPTGLFSRKVKISDL

SEQ ID NO: 229 - protein, 1174 aa, Lactobacillus mali ATCC 27304
MGKYSIGLDIGISSVGWSIIDIEKKKIVDLGSRIFPSGNAAANQDRRGYRGTRRLIRRRKNRLADVINFLGEENFIDTKVVDQNGNIHYKLLVNSTESPYKLRVKGLSKMLTKQELVIALYHIVKHRGISYDLGDLEDDGTSGVTDYKTSININRQLLIKKTVGQIQLERLKEFGKVRGHVKKDENITLLNVFPSSAYVKEATQILTKQREFYPEITDDFITKFIPFISRKRDYFVGPGNEKSRTDYGIYKKDGRTLDNLFDELIGIDKISGEKRASASSVTAQIYNMLNDLNNLTVTNTEDGKLTTQTKREIIEADKTTNGLFGITQICKIIGCKKDDIKGFRIDKVEKPIMHTLSGYRRFRKELAKINIEANDLDINLVNKIADILTLNTEKAEIRKQLNKSNIDVSNEIKELIINKNKDFLVDGRATWHSFSYKTLNLLIPELMNTSEEQITILTRLGLVKSNSEKYKGLKNIPARRITEGIYNPVVAKATREAVNVFNAIAKKIGRDNISDVVIELPREDNEADIKKGIVKRQKQNELEKEAADALVKQQMTISDSALVAHYRKVRGLSQKVRYWYQQGTCCPYCGKNIEAVQLINNNDSFEVDHIIPISVSFDDSQNNKVLVHSQCNQAKGKQTPLGWLNNGGGFGQNKTEYVAKVKTNKNYSKNKMDNLLNDMDLSDIVTQRGFIQRNLNDTRYASRIVLDEFYSFFKSNNLSTKVKIVRGKWTSQMRKKWNGVGGLKKTRDTYHHHAIDASIIASFPLLKVFDKAIKLIDIDRETGEILQDKEAIKMSQEAKLLEKIPVIQNEKFEELINELYDFPLFKQVELANDITNPENPVKFSHHVDKKANRSVANQTIYGTRIKEKEINKRGKVEKVQERYILGTIKNIYDIDSFTSFKKIYDKMSKTGDVKFLMQKKDPKTWGKLVEILNSYPDSEEITQVDGKVKRVKVSPFELYRRENDFITKYAKHNDGPKIVSIKYYDSKIGSHIDITPINAKNKVVLQSLKPWRTDVYFNSETRQYELLGLKYSDLKFTNGVYGITSEAYEKLKHGISEDGTKTWKPIGKNSGFRFSLYRNNRVKIVDEKGESLELLFASRTTSNEGYVELKPIYKSKFDSKEDVGFYGQMTPSGQFVKKMARVGYKLYKVNTDVLGNPYYITKESDDPELSLYKK

SEQ ID NO: 230 - protein, 1357 aa, Lactobacillus mindensis DSM 14500
MNDRNKKYNIGLDIGTGSVGWAVTDNNYNLLHAKKKNLWGIRLFDGAETAASRRTFRSTRRRYRRRRNRINWLNEIFADELAKKDQSFLVRMNSSWVSKKDKIRQRDQYNLFMDSDYTDVEYHREFPTIFHLRKRLIEDKSQADIRLVYLALHNIIKYRGNFTYEHQNFDVSHMDSGLALLLNQLNQQLQAFEVAFPDETNFESMSTILLEKKTPTQKIDEIVDQIQPEKDLLQITKNIMKMLLGNKADLVKIFSLDSDDKITVEFSSNSIEQDLSNLEETLSDEQFNIITLANSIYSSIVLNDILSGETYLSFAKARQYSDHKKDLAKLKTMWRESPDRKAVGKAKKAYDDYLHSGKYGIEDFYKDMSKFLETATPVELAKEANEKILNKSYLLKQRNNENGVIPFQLNKNEMIEIINNQAKYYPFLAENKDKLLSILSFRIPYYVGPLQSKKDNPFAWMEKKSQGKIRPWNFDEIVDREASSNNFIRRMTSTDTYLIGEPVLPLKSPIYQKYEVLNELSNVRINADEVDNPLGDKLSVDLKQAIYNELFLKHRSVSKALLTKWLINQSYFQNPQISGLADSKKFNSGLTTYHDFKKIFGEDFVNDPTNQSQLEQLAEWLTIFEDKKILKIKLDDSQFNCTPEQIKKIAGMRYQGWGRLSKKLLCDIKTTTVTSKNHQQASYSILDLMWNTNRNFISVLKNDTYKFEDKIQTFNLDKNEAATPQAMIDELQTSPALKRGIRQSVTIIQELVKFMGHAPEHIFLEFTREDDVSSLTKSRDSRLNKLYARIAKNTKKTDDELKKSLLPSSDIKATLKANKNNLSNDRLMLYYLQMGKSLYSNQPLDINRLSEYQIDHILPQSYIKDNSLENRALVLASENQHKSSDLLLKPEIINQNIARWRYMKDAGLMGPKKFKNLTRIQITDSDQNNFINRQLVQTSQIIKHVSNILDSMYGDQGTQCVETRAHLSTEFRKAFSNEDDNYHFQHPEFVKNRNINDYHHAQDAYLACLLGLYQMKKYPTDNMILLKKEYKRFFSNTKKIYDKKHHFPDYVKNGWIIGSMFNGEKYVDEETGQIIWDQQTKDMVSCIFQYKQYNVTKRTEAANGEFYNQTVYKKDPNEKRKLISLKQGLDTKLYGGYSGDNPAYIVLVKIDDKKNKLVKMPIRLAEQVDNKTIDLQTWLEENVPHKKGIQVLKTKIPLGQVIYSKKNGYLALKSDTEIVNAQQLVLPYGYVALLTLLQKMPENKYDEVLACYDDGILDNIFVAIIDKMKHFYPYYSGELKTLSDNIDNFKESPDVNKIKTLQQLLLLLHASSTTASIEFNNVKKNSLGRKPNSINIQNTDLLSFSATGLYESRIHID

SEQ ID NO: 231 - protein, 1382 aa, Lactobacillus mucosae DSM 13345
MDIGTNSIGWTAIDDHFSLLRVKGKNAIGVRTFKEGETAADRRGFRTARRRLSRRRWRLQFLDEFFAPYLAEVDPNFLARLKQSDISAKDPAKNQEYMGKLLFPDQEAASDGNGYPTLIQMRKAMPAEKAADFPVFNIYQLRYALMNEKRKFDLREIYLAVHHIVKYRGNFLNNTSVDKFKADQIDFNKSFETLNDLFRQVQPIAPFQIDLTKVDELGKLLLDTKQKKLDRQKAVAKLLPLIEDGTDKEIVKAHQQTAREISKLILGYKAKVGLILQNNLDQTLDMSTENSDDQLMQIAEELDDYQMELINQLSLLYSQIMLNEIVPNGETVSASMLNRYYKHRCQLKELKDYGAAQDKKTREQLDHLYAEYIGQIPKDSKFDFTKDLKKLMDKSDLGQKIKDEIEAGDYLPKQRTSANGVIPHQMHQQELDQIIENQKEYYPWLAEPNPVEKNIKNAKYKLDQLVSFRVPYYVGPMITLADQQKTSKASFAWAVRKKAGKITPWNFYDMIDREKSANNFIKRMTNKDTYLLSEDVLPASSLLYQKFTVLNELNNIRVNGRKLQPALKQAIYTDLFQKRKTVNLKTLTNFLAIHEPTLTKPKIEGLSNGRSFNSSLGTYIDMSKILGDSLDDLNYRDDIEKIIEWSTVFEDSEIYGVKLQEIQWLTNEQREKLVRKRYQGWGRLSKKLLTGITDENGQRIIDLMWDTSKNFMQIVHQPVFEEQIAELNQQLLQDADKAPLEVVDDILADAYTSPQNKKAIRQVVKVVADVVKAVGNAPASISIEFARNEDRNKELKNSRRHSIEKLYHETAEKLVKQTNLLEELGNVKDLNDRYYLYFTQAGRDMYDGTPINIDEISTHYEIDHILPQSFLKDNSLDNRVLVKKSENAAKSDRVPAKLYGAKMRAFWKQLKESQLISNRKYLNLTTDPEQVDKYQMQGFVHRQLVETRQIIKLAANIFGSLYPDSAVIETRAELTKQLREKFSLYKVRDVNDYHHAVDAYLTAFAGHYLYQRYPKLRPMFVYGDYAKIYADDLKRLRSVNLFHDLEKDQYNSGTAVNPETKEKIVDVDWLSDYVSKIQHFKYMLISKAVYTQHGQLYGATILPVAQVDKISAPIGIKDDKPVDIYGAYTNEVAAYMAIVRVNGKKPKYKVVSVPVRMLQRLKMAEQKGHDQYMQTLHDVLLRNFTSLKKNRKTGLKEAVVKDFDVLVPCVRYNQLVIDGDTKFTLGSATYQHNAKQLVLCNHSLETLANNFEYVRKHPDEADERMIMLYDDILDQVNHYFTLYDKNKFREKLNAGRDKYLKLPTFSQFENNKKTAIGKSEAIINILRGLHANAAITNLKCLGVSTPFGQLQSPSGIELSENAKLVYQSPTGLFSREVLLKDL

SEQ ID NO: 232 - protein, 1376 aa, Lactobacillus namurensis DSM 19117
MDKKYGIGLDIGTSSIGWTVVDKYGHIIRVKGQTGIGVRLFREGQTAAERRTFRTTRRRLSRRRWRLRLLREIFDEPISAIDENFFARQKASSLAPGDARYQQAFQLFNDRTDQAFYCKYPTIYHLRQALMTESRQFDIREIYLALHQIIKYRGHFLLGGAAKDFQSDKLDLEAYFTTINAQLAGIYSDGSVQLPTLDWNQACQELTDTSRTQSDRKNWLVKELKSYGDSQLKPIYTQIANAILGFKTDLAKIMGINDPEKALSFNLDALDDHRDDVAELLTDEQIPLVNLLAKLHTALELAAILPDGQTLSGKMVEIYETHRKQLKTYKAFIRQLPDRQQRLALKQAYDHYIDQGLNREAFYSEVKAILEKQKPLTATGQAMKKAMDQNAFLLKQRTKTNIAIPYQVQQQEMDQIIANQSKYYPWLATPNPVKSRRVIAPYKLDELVCFRVNYYVGPLVQSKPGEATKEAKFAWMTRKDPQSTVAITPWNFDQQVDRQASANAFIQRMKTTDTYLLGEDVIPKNSLLYQKYEVLNELNNVRVNGDWLDPQRKQYLFKKLFMDQPQSVVTVKALQKTLVVIGACPTLPTVEGLANPKRFLSQLTTYHDFCKLLPDDIQRADRQADIEKIINWSTIFEDTAIFKEKLRDIKWLSADQIRRLSSRPRYRGWGRFSAKLLCGLHDRQGNTVMDELWQTSRNFMQIIRQSDFQTAIAAVNQQDLGRQDLQRVIDDLYTSPQNKKAIRQVLAVVTDIQKAMHGKAPSWLFVEVAKGAQKNPQRTQSRQSKLAEAYRESARELVDEAVKEQLLTLPDDRQTFSDRLVLYFQQNGRDIYTGEPLDFERLSNYHIDHIIPQAVVKDDSLDNRVLTSNQANLEKGAHVPTIFRDKQEPVWQELYRVGLISHRKLRNLLTTPDDLDDRGRATGFIARQLVETRQVIKLVMEVLSQYYDTTETELISIKAGLSHQFRQELNLPKLRALNDYHHAQDAYLAARIGTYLLQRYPNLKRFFVYGDFKKTHFDLQRRFNFIGGMISREKQPYNLIKNPVTHQVIWDEEMEIGDCQKKNPEQPKHDATVKMMNLTKIMNLKHILVTHEVYENHGALFNQTIYPASQAHKKKLIPQKTEKPIELYGGHSSEQAGYMAIIRLLGKRPGYKVMRVPVRYVSQLQHQDVAEQKKLLYKIFVSELTSRNKVKPFEVVVPHVCLNQPVEDMIKGQWHRFALRTNGYYQNQQQLILSLVAQRTLAGYKPKDDELMAVYHEICKQVKYYFPLYKMNKFQSRLFAAEELLQKRSTVNSFSITIGKNGKENKTLNLGKRELLLRLLGGLHANATRVDLKDIGCTGQFGQLQVKNGIKLTEQAVLIHESPTGLFHRRVRLNDL

SEQ ID NO: 233 - protein, 1137 aa, Lactobacillus nantensis DSM 16982
FYFKIRLSEVVIMADRISLGLDIGVASVGFSVLNIDQGKVVELGARLFNAKVAEGNQDRRSMRGSRRLLNRKKQRRQDTAKLFEEFGLISNYDKDNFSEFFDNNENPYELRVKGLTEKLTKNELAESLYQIVKRRGISYDLKDADFEDGGTDYSSSLSLNNKALEDKTPAEIQLQRLNEFGAVRGKVVVGDDLDNQKVLLNVFPTKEYKKEAQRIIATQREFYPDILTDEFEKQYCSILTRKRDYFVGPGNEKSRTDYGIYKTEGRTLDNLFEELIGHDKVYPDELRASAASYTAQLFNVLNDLNNLRILSYEDEKLTQADKETIINELKSNVTTVNMMNLIKKVSGCEKDDIKGYRTNDKDKPEISSMAIYRKTHKEFLKADVDITQPIEFINELSFILTLNTENGEIRKQIVKKLKPHYDFVDDNLIQKIIDHKDSFEISTNNKWHRFSIKTMSQLIPIMMERPIEQMTLLNELGLVKKDSKRFANNKYLPYREIANDIYNPVAAKAVREALKIVNASLKKYGHIDYLVVEMPRDKNLDEEKKQIEDFQKKNKIAKDEAYRAFVTAVGDEKTVKIALSKSRKLQMEMRLWYQQNEIDPYNGETIEAVDLIRNPDKFEIDHIIPQSISFDDGINNKTLCFASMNQVKGQKTPMEFLNEGHGQGWAKFKAMVSGNPRFGKSKKQNYLFAENVSDIETRKRFISRNLVDTRYSSRVVLNSLQEFFSEKSDGTKVTVIRGKFTSNMRKHWHIDKTRETFHHHAIDASIIAATPFLNMWKKGGSIFPVKVGEESIDIDTGEILDDKKFDKIMYEQPYNGFVTEIMNADDRIKFSHQVDKKMNRKVSDATIYSTRIGQLVKDKKVAEYVVAKVKDIYSVDGYKKFRKVYDKDKTKFLLYTHDERSFSELEKVLYMYPDKIDQTQNNGKVKSIDISPFELYRRDHGMVKKFSKKNRGPVIKQLKYLDKKLGSHIDITPANANDKHVVLQSLNPWRTDVYLNHEIGEYEIMGIKYADLKFNKNGEYGIKRDKYIEIKEREKVSKNSEFMFTLYKKDRIKVENMDNKENIELLFWSRNMSNNGYAELRPISKTVNDGTIPIYGKGRLIKRLIPKNCKIWKVNTNILGDPYYVEKESENPKDILD

SEQ ID NO: 234 - protein, 1132 aa, Lactobacillus nodensis DSM 19682 A
RNLENKISLGLDIGVASVGFSVIDAQEGKVLELGARLFNSSVSAENQTRRDMRGSRRLSNRKKQRRKDVAQLFKTFGLINYFDKENYFDNFQNNLNSYELRVKGLSEKLSKEELVNSLYHIVKRRGISYDLADADTDFDGSDYSSSLNQNQLELQTKTPAEIQLTRLNVHGAVRGKVTINGEDEDTMQVLLNVFPTKSFVSEAKKIIQTQQQYYPDILTDIFETKYLEILERKREYFVGPGSEKSRTDFGIYKKDGRTLDNLFEELIGHDKIYPDELRASGASYTAQVFNVLNDLNNLRISSYENGKISTEDKIKIVEDLRNNIGNVIIMKIIKKVAGCEDDDIKGYRLDSKDKPDIHSMAVYRKVHRDLLKYDVDIIKWPTEFIDELSPILTLNTENGEIRKQMVNKLQPKYSFLTDELIQVIINNKSSFDVTSNNKWHRFSLKTMNVLIEEMFRRPVEQMTLIQELGLIKDSGKRFENCKLLPYREISKDIFNPVASKSVREALKIVNAVMKKYGQIDYLVIEMPRDKNEEEMKKQIEKFQKENNKQKDEAINEFVKKIGNKNAVDDGLRRYGGKLYFKIRLWYQQDGIDLYNGKVIEPFDLLNNINKFEVDHIIPESISFDDSINNKTLCYADMNQIKGQKTPFEFMNEGHGQGFAKMKAMVNKNSKLKGKRKNYLFDENISDIETRKRFISRNLVDTQYSSRVVLNSLQEFFKEKETGTKVTVVRGKFTSNLRKHWHINKTRDTFHHHAIDASIIAATPFLRIWKKDASLFPMHVSENTVDIETGEILNDTEFKKDFYGLPYSSFIEELNGADDRIKFSHQVDRKMNRKVSDATIYSTRKGMLNKDKEETDYVLGKIKNIYDVSEYNKFKRIYDKDPNKFLLAHHDPKSFDELRKIMQEYPSKIDKVMTNGKVKSVDISPFELYRRKHGMVQKYSNKNKGPVIKQLKYLDKKLGSHIDITPKDTLNDRHVVLQSLKPWRTDVYYNSVTGEYEIMGIKYSDLKFNGGEYGIKMSKYLEIKEREQVSDESEFLFTLYKRDRIQIINCENDEIVEMLFWSRNNSNIGYAELKPVYKYKTEDESWPVYGYGKNQILKRLVPKNCKILKVNTDILGNPYYIKKESKNPKNILD

SEQ ID NO: 235 - protein, 899 aa, Lactobacillus nodensis DSM 19682 B
MNRKTTKFNIGLDIGTGSVGWAVTDDNYNLLHAKKKNLWGVRLFNTAETAADRRLNRSARRRYRRRRNRLNWLDEIFADELFQADPGFLNRMKHSWVSKKDTARTRDEYNLFIDKEFNDKTYFDKYPTIFHLRKHLIEDTQKADIRLVYLAIHNILKYRGNFTYEHQNFDVSKMNEGLENTLSNLNNSLDLFGLKLPDDADFKKISEILLEKDWSPSSKVSSIITLLKPEKDMKQLYKQIFTLLVGNKADLTKLFNIDSAEKITISFSSNTIEADLSDAQEKLTDEQYAIVEMANPIYSTIVLNEILNGETYLSFAQVTKYENHHEDLMKLKDLWRNDSDRKAVKKARLAYDKYLDDGKYNLDDFYKDLKKYLSTKEDPYSQSALEKMENHQYLLKQRTSDNGVIPFQLNENELVKIIDNQSQYYPFLKENKDKILSLINFRIPYYVGPLQSEDKSDFAWMERKANGPIRPWNFDEKVDREKSSNNFIRRMTATDTYLIGEPVLPKYSLIYQRYEVLSELNNVRIKSTGEESDKGSRLNVDVKQRIYNELFKKHTTISTKRLTDWLRKESYYSAPEIHGLADKTKFLSSLSSYRKLAKIFGNDFVDDSKNLKQLEEVIEWQTVFEDRQILKLKLKNSKLYTDDQIKQLAAIRYQGWGRFSNKLLTQLLVETKVNGEHMPSNHSILDLMWQTKSNFMEIIREDKYNFEKQIKDYNVGDAADKKPLDLVNELPGSPALKRGIWQAIVIVQELSKFMKHAPEHIFIEFTREDQDSGITKSRYNQLDKKYKNIGDMVRNLAPKLKNTLYLKAQLKDKKDALSNERLCCTSYKWVKAYTVKPRLISTVYSRQIIKLITSCHSHISRTIHLKIRLWSKQVKTKENSMTYSYQTMSLPTTFNVGNN

SEQ ID NO: 236 - protein, 1357 aa, Lactobacillus oligofermentans DSM 15707
MAAKNYNIGLDIGTSSIGWAIVDDNYQLMHAKGKYGYGTRIYSEGQTAADRRGFRTTRRRLNRRKWRLRLLQDFFEPYILPQDEAFFIRQKQSNLVPQDTKKQYPESVLFDDTSDKDFYTEYPTIYHLRQALMTENRQFDIREVYLAIHHIVKYRGHFLNNAPVKTFKSGNLDLAIKFNELNEEFKSVYPDLELQFNLDQIDEIKKILLDSTKSRFDRQGEAVKLIYTVSEVKTIEKLQNKIVKQFLSGILGLNTRFDVLTNTESDDSMWKFSLDSESSDDALDEIIAQLDDPAIHVVELVNEIHSSITLAGIVPEGQGLSESMVEKYEAHKAHLQLLKAVEKLVDKKAADKLEVAYDQYINGKDSKQFIKEDFYKAVQSEIKGVAGDEVAEINQLIELDQFMPKQRTKENGAIPHQLHQHELDVIIENQSKYYDWLGEKVGNEYKLDKLVSFRVPYYVGPLVDTASKEKKDETRFAWMVRKNPESTEAITPWNFEDIVDKNASAENFIKRMTTKDKYLLNEDVLPKCSLLTQDFEVYNELNNIRVNGEKFTAEQKQLIHDELFTKHASVSIKQLKDFLVSELMYVRDNLKVEGLADEKKLMSSLSTQFDYQKIIPDQINDVKYREDIEQIIEWSTIFEDAAIFKTKLKEIDWLTDEQRNKLANKRYRGWGSLSKRLLACLVDENGQRIIDILRDSSDNFMMIVNRPEFKQAIFDENANLTETNSKKDMFEMIDNFYTSPQNKKAIRQVLLVVQDIQNAMGGVAPQKIFIEFAREDEVNGRRTNSRYSQIREMYSKVTDDVINKTVRGELEANKGSLNKEKLFLYFLQGGIDLYSGKTINIDNISSYDVDHVLPQSFIKDDSINNKVLVNAKGNRVKNDNVPMELFGAKMYPTWKRMVDTGIMSKAKFKNLTLNPDNVDKFKAEGFINRQLVETRQIIKLVAQILNDKLGDDTKIVSVKANLTHDMRVFFDFPKNRNVNNYHHAFDAYLSAFVGTYLYKRYPKLQPYFVYGEFKKMDKLKNMTSFDFLRDLKHTDKVVDKDTGEIIADKLAVITNMNKIYDFKKVLVTHEVHENSGAMYDQTLYPAKLDKSLGRKGAKQLIPKKDDMPTALYGGYTGSKDAFMSIVRLKKKDEVYYKVIGIPVRIADSVQHGKEVDVEALTQFIETKFTKENLNKKTGEITRKVEWFELVLPKVLFGQAVFDGGQPFMLGSSTYPHNLRELVLTKDSVKKIAGKESNKSYLDAYDEIMEAMNKYFPLYDTNKFREKVIEGRSKFIDLPDKDEYENNKLVQVGKSTIIDRMFIGLHANAARTDLKNIGITTPFGFMQQASGIKLTKDTVVLFQSSTGLFERKVALKDL

SEQ ID NO: 237 - protein, 1395 aa, Lactobacillus otakiensis DSM 19908
MVISSCIIGDVPKGVTGQHYFEEFYRMKVNNYHIGLDIGTSSIGWVAMGEDGKPLRVKGKTAIGARLFQEGNPAADRRMFRTTRRRLNRRKWRLKLLDEIFDPYITPVDSTFFARLKQSNLSPKDSRKEFKGSMLFPDLTDKQYHLDYPTIYHLRHALMTQDKQFDIRMVYLAIHHIVKYRGNFLNSTPVDSFKASKVNFDDQFKKLNELYTAINPEESFQINLANSEKIGQQFLDPSIRKFDKKKQIPKIVPVTMDDKAVDKLNGKIASEIINAILGYKSKLDVAVQCDPEDSNPWAVKFDDEDIDAKLQKILPEMDENQQSIIGIIQDLYSQVTLNQIVPNGMSLSESMIKKYNDHHDHLKLYKKLIGQISDSKKKTALKKAYDQYVGNDGKVIEQDDFYSSVKKNLDDSELSKQIMDLIDADKFMPKQRTSQNGVIPHQLHQRELDEIIEHQSKYYPWLAESNPNKHDLHLAKYKIEELVAFRIPYYVGPMITPEDQKKSGAAVFSWMKRKEPGQITPWNFDEKVDRMESANKFIKRMTTKDTYLIGEDVLPDESLLYEKFKVLNELNMVRVNGDSLKVADKQAIYQDLFENYKHISVKKLQNYIKGKTGLPNNPEISGLSDPDQFNNSLGTYNDFKKLFGDKVDDPDLQNDFEKIVEWSTVFEDKKILRAKLNEITWLTDKQKDDLESSRYQGWGRLSKKLLTGIVNDQGERIIDELWNTNKNFMQIQSDDDFAKRIHEANADQMKSTNMEDVLADAYTSPQNKKAIRQVVKVVDDIQKAMGGVAPKFISIEFTRSEDRNPRRTISRQRQLENTLKDTAKSLVKSMNPNILSELDNASRSKKGLTDRLYLYFTQLGKDMYTGEPINIDEISNYDIDHILPQAFIKDDSLSNRVLVSKAVNNGKSANVPLKLFGAKMGHFWKQLAEAGLINKHKLKNLQTNPDTISKFAMHGFIRRQLVETSQVIKLVANILGDKYRNDDTKIIEITARMNHQMRDEFGFIKNREINDYHHAFDAYLTAFLGRYLYHRYIKLRPYFVYGDFKKFREDKVTMRNFNFLHDLTDDTQARIADTETGEVIWDRETSIKQLRDVYHYKFMLISQEVYTLRGAMFNQTIYPASQAGRKKLIPMKADKPVDVYGGYSGSTDAYMAIVRIHDKKGDKYKVVGVPMRALNRLNTAKNVSDAKYDQELKEVLTPQFTKSKKNRKTGEITQTVEDFEVVLGKVMYRQLVIDGDKKFMLGSSTYQYNAKQLVLSDESIKTLASEGKLNEAQESAAYDKVYDEILDKVNKYFALYDTNKFRQKLSLGKDKFVGLPNHNVFDGSKKISSGKREILNEILNGLHANATLGTLSDIGFSTPFGKMQQPRGIGLSSNTSIEYESFTGLFKRTIFLKDL

SEQ ID NO: 238 - protein, 1078 aa, Lactobacillus ozensis DSM 23829
MHKHYKYALGLDVGVGSVGYALLKLDEADQPCGLLKANSVTFPMSQDRTGNTLASIARNYRSGRRLNRRRKLRKQLVSNLFTKNGLINRNDVYSPYTKHPNFDLYRIWHDSFNQQISNQDLYRLLYYFAGHRAFKSNRIHQLKSSGDKDTTKLLSSIDTNKEYFNNSQYNHLGEMFYCDPKFAQRKHNKGYDDGYLFNIDRGTLLSEIKEILNAQSKFGNPAINDDFKARYLKILSQQRNFDVGPSNPSRFALVDSSGNIKLRNKKDKLNLSFKTSAKASYTFQKFQILQKLANTRYKLNSQSKYQSLNAETIDKIFNKAITKANYKYSQLKKDLKLPDSARFNMVMYETSDDKSAKQAETKTFIIKDNTYYILSKILSDKLQHDYTVIDQIAEILTRYTSDEPKAKALKRQLGEKLSDEKIESLLALNFTQYGSYSIDTMQCLIPYLAKGYDVTTAIDAFNEDQASLENGHSPLIDASMNYHEIISSIKNPALLQSFTKTVKVVKALIRRYGNPYTIHIEMARELSLGNKGKAELIKKQNENRKRNDKVITEMKENFPNVSINGENIIRLKLYHEQNGIDIYDGRMIDYQHVLDNNYEVDHILPYSISFNNSFNNKVLTSSRNNQLKRNRTPYEWLHNDKVRWDTFTSIAENVRNYPKKNNLLKMHYDESDMKKWKTRSLNDTRYATRLLYNYFKHNEQYFDAKPSVMTMNGSMTAQLRYYWGIVKQRAASDKHHAVDACVIATCSNSMVNLISKYHTAREKEQLSSKFPMPWPDFRNDVMNAKQQMNVKRIFSHSIAGKVNEDGLKGARYINTDKVVVIHEKLANLKLKKVGDDYIIVGHGNSRYLRPDDLTSISNRNSKNDLNSVIYDHIYNALSKDKKAFEKQPYLEFEHKGHKYTVRRVKVISDYKGGVILNRDADGNPISVANRGKMVRNDIFKCLDKKERVVYRFVPIYEHQILDTHLPNQYAPFAKNIFVNDKDQFICSLSKGDAVEVKLSTPKKVENCDEPYVCDHFIGYFDGSDISSNRIKINALDNSCSIRASMSKLISIQKCDVTIFGSIHKVHEKVRQPFNLKHK

SEQ ID NO: 239 - protein, 1362 aa, Lactobacillus paracasei subsp paracasei 8700:2; identical to SEQ ID NO: 205

SEQ ID NO: 240 - protein, 1362 aa, Lactobacillus paracasei subsp tolerans Lpl7
MTKLGKPYGIGVDIGSNSIGFAAVDENSHLIRLKGKTVIGARLFEEGKAAADRRASRTTRRRLSRNRWRLSFLRDFFESHITPTDPNFFMRQKYSEISPKDKSRYKYEKRLFNDRTDAEFYKYENCPTMYHLRNRLMTDPSKADVREIYFAIHHILKSRGHFLTPGDAKDFNTNKVAVNKIFPALQDAYAQVYPDLDITFDENKVNEFKTVLLNEKATPSDTQRALVNLLLAKEGDRDILKQQKQALTEFAKAVVGLKTKLNVALGTEVDSSEATAWNFSLGQLDDKWTGIESAMTDEGTEILDQIRDLYRARLLNGIVPAGKTLSQAKVDDYAQHHEDLELFKDYLKQLEDDGTAKAIRQLYDRYIDGDDAKPFVREDFVKALTKEVTAHPNAKSPELLERLAQPDFMLKQRNKANGAIPVQMQQRELDQIIKNQSVYYDWLAAPNPVEKHRKSMPYQLDELLNFRIPYYVGPLVTAKEQKAAQGGVFAWMVRKDPDGNITPYNFDEKVDREASANTFIQRMKTTDTYLIGEDVLPKQSLLYQSYEVLNELNNVRVNDNKLSFDQKQQVLGELFERHNTVTIKQFVDNLLAHGDYDRIPEVRGLADEKRFLSSLSTYNQLKGILHEAIDDSDKQTDIENIIAWSTIFEDKAIFKTKLNEISWLNAGMINSLANIRYRGWGQFSHKLLNELTLSTGRTVFEELLISSHNLMQILTDEVLKQKIAELNAHELKASGIYAAIDDAYTSPSNKKALRQVLSVIDDITNAAGQAPNWLYIETADGDGVPGKRTNSRQRKIQEIYANAAQELITGSVRGELEDKIASRADFTDRLVLYFMQGGRDIYTGKPLNIDNLSSYDIDHILPQSLIKDNSLDNRVLVHPLVNREKDTIFASTRFAKQMNGMWRQWHAAGLISSRKLRNLQMRPDEIDKYASGFVARQLVETRQIIKLTEQIVADQYPDTKIIAVKAGLSSQLRKELDFPKNREVNHYHHAFDAFLAARIGTYLLKRYPNLEPFFTYGKFKKTEVKKLKSFNFIRDMTHAKDKIVAKETGEIVWDNASDINELDRIYNFKRMLITHEVRFETASLFKQTLYAAKNSKNRGGSRQLIPKKKGYLVDIYGGYTQETGSYLSVVRLTKKAMYAVVKVSTRDAAKLAVAKSISEQKENETLKKIIDGKLSKTSKKGKTTHQLFEIVLPRVGQKTLFKNSKYNQFLVNSDTYMHNYQELWMPREYQRMWKDILLSNHGDAQLEGQLDQIFKFIVSQVNSYFNLYDINQFRKKIADATDKFAKLPTHDTDNARGKIATIGQLLIGLQANAMRSDLRNLDIKTPFGLLQIGTGITLDLDTSIIYQSPTGLFEREVPLTDL

SEQ ID NO: 241 - protein, 1368 aa, Lactobacillus paracollinoides DSM 15502
MDKKYSIGLDIGTSSIGFVGVDENGWPLNIKGKRAIGAHLFREGEAAAETRGFRTTRRRYNRRKWRLRLLREIFDEPISRVDPTFFARMKESSVSPKDPNYDGLAKEILIPRDKDGKILYPTIYHLRHALMYEDHQFDIREIYLAIHHIVKYRGHFLLDGAAKNFESSNLDLKSDIHEINAILVGIFGNEQVQFNDQYVEKLKEVLLDSTQSRSDRQKAAAKLLLPTNDLDKDTTKILKTVSTEITKAITGLKAKFFVITGNDIAKDQQKDWTFSIDTLDEKMSVIEPSFSEKNFSLITILQKLYSSVTLAGIVPNGLSLSEAMIQKYDRHASDLVLLKKYWDTKPKVLKHQLQNTYAEYIEIHQVVDEFYSDLSKLIKNDDDTLAQEIKSKITIGNFLPKQRTTENGVIPYQLQQRELDTIIKNQQEYYPWLAEENPVADHQIAFPYKLDELVGFRIPYYVGPMIAKEDTSNSKNSKFAWMIRKQSGEVTPWNFDEKIDRTASATAFIDRMTTTDTYLIGEDVLPKQSLIYQRFEVLNELNKISIDGQPITRKQKQSVYTHVFEKKKTVQVKDVQKFLVSSGEVMSLPKIGGLANEKQFNSSLSTLYDYNKIIPDALEDRNKVDDIEKIILWSTIFEDNSIFVEKLDSIDWLTSSQRKRLAQKRYRGWGRLSLRLLTTFKNKDGYSILDELWNSNHNFMEIQAQSDFSEQIATANNNNLSQVLPAKWEPGRKNLASLDEFISNLYTSPQNKKALRKAIRVVQDMMTAAGHMPEKIFIEVARDTSNSHQQTIARQRQLQQLYQSEDKEVIDSSVRSELDDILKNRANIKDQLFLYFQQGGRDLYTGKAINIDKLSLYHIDHILPQSLVKDDSLDNRVLVSQKTNEDKGVTFVSDKYMNNMLPTWKRWHEMGLISARKLKNLTMRPDEIDKYAPGFIQRQLVETRQVTKLVIELLDALLGNSQTEIITIKASLSHQFRQQFDLVKIREVNDNHHAFDAFLAARIGTYLYKRYPKLRPYFVYGQYMQNHKNLKSINLIKTLDSDKAIVDEGTGEILWDKKSDLAKMIKIYNYQRLLITHESRTSFGAMYKQKILKATDAKQNGGGFKLVPTKRNRPVDIYGGYTGQTAAYLTIVRVYSKKTSELRVLPIYTNKVQQIEKAMTQGDKATMLAFKKVIAPQLGKENKKTHEIKIPEFDVVIPKVLLDQLVIDDIAGSPHRFRLGTDTYYHNSQQLFLPLSMQRQLMDRESDDKVYLDIFNDVLKQVDSYFNLYDVNGFRAALQKSKKAFEQLPINDFPKDVPDNKKKKGKRSILKEIFIGLHANATLGNLKQMGIKTDFGKLQKSNGLRITENCKIIHQSPTGLFERIVPIK

SEQ ID NO: 242 - protein, 1386 aa, Lactobacillus parakefiri DSM 10551
MCLKEFTGQHYFEEFYRMKVNNYHIGLDIGTSSIGWVAMGEDGKPLRVKGKTAIGARLFREGNPAADRRMFRTTRRRLNRRKWRLKLLDEIFDPYITPVDSTFFARLKQSNWSPKDSRKAFKDSTLFPDLTDKQYHLDYPTIYHLRHALMTQDKQFDIRMVYLALHHIVKYRGNFLNSTPVDSFKASKVNFDDQFKKLNELYTAINPEESFQINFANSEKIGQQFLDPSIRKFDKKKQISKIVPVTMDDKAVDKLNGKIASEIVNAILGYKSKLDVAVQCDPEDSKPWAVKFDDEDIDAKLQKILPEMDENQQSIIGIIQDLYSQVTLNQIVPNGMSLSESMIKKYNDHHDHLKLYKKLIGQISDSKKKTALKKAYDQYVGNDGKVIEQDDFYSSVKKNLDDSELSKQIMDLIDADKFMPKQRTSQNGVIPHQLHQRELDEIIEHQSKYYPWLAESNPNKHDLHLAKYKIEELVAFRIPYYVGPMITPEDQKKSGAAVFSWMKRKEPGQITPWNFDQKVDRMESANKFIKRMTTKDTYLIGEDVLPDESLLYEKFKVLNELNMVRVNGDSLKVADKQAIYQDLFENYKHISVKKMQNYIKDKTGLPNNPDISGLSDPDHFNNSLGTYNDFKKLFGDKVDDPDLQDDFEKIVEWSTVFEDKKILRAKLNEISWLSDKQKDDLESSRYQRWGRLSKKLLTGIVNDQGERIIDELWNTNKNFMQIQSDDDFAKRIHEANADQMKATDVEDVLADAYTSPQNKKAIRQVVKVVDDIQRAMGGVAPKFISIEFTRSEDRNPRRTISRERQLEDTLKDTAKTLVKSMNPDILSELDNASKSKKGLTDRLYLYFTQLGRDMYTGKPINIDEISNYDIDHILPQAFIKDDSLSNRVLVSKAVNNGKSANVPLKLFGVKMAHFWKQLAEAGLINKRKLKNLQTNPDTISKFAMHGFIRRQLVETSQVIKLVANILGDKYRNDDTKIIEITARMNHQMRDEFAFIKNREINDYHHAFDAYLTAFLGRYLYHRYIKLRPYFVYGDFKKFREDKVTMRNFNFLHDLTDDTQARIADTETGEVIWDRETSIKQLRDVYHYKFMLISQEVYTLRGAMFNQTIYPADEAGRKKLIPTKADKAVDVYGGYSGSNDAYMAIVRIHDKKGDKYKVVGVPMRALDRLNAAKNVSDAKYDQVLKDVLTPQFTKSKKSRKTGEISQTVEDFEVVLGKVMYRQLVIDGDKKFMLGSSTYQYNAKQLVLSDESVKTLASKGKLDEAQESAAYDNVYDEILDKVDRYFALYDQRNYRTNLHEGEQKFIGLPLHDTFDGSKKVANGKRETISDILNGLHANATMTNLKVLGISSPFGMFQSHGPINLNPETIILCQSPTGLFERRIILRDL

SEQ ID NO: 243 - protein, 1382 aa, Lactobacillus pentosus IG1
MKKIVNYNLGLDIGTSSIGYAAIDDQGRPVRHQNKTVMGVRLFKEGKTAESTRIFRGTRRRLSHRHWRLGYLDRIFDNEIAKVDENFLPRLKASKRARSDEKRSFRGSLLFPETGDDAYYQKYPTIYHLRYALITQKKQFDIRLIYLALHHMIKYRGNFLDTTPVSAFNIHDIDLTDQFASLNDCYQLLDMDFEFQFDLNNIEQVQKLLLDETLSKTKRQAAVSKVLVMSTGNKAFDDQQNGIASEFIKALLGGPFDLSKILNLSVADVKSWKLHMTDKDVDDTLNSLVEELDENHKQIVNLLQMIYSQVMMLGLLNGQQSISASMIERYDDHAKHWAALKKLLPALGEQEQSTIIHAYTAYTGHSRTKQLSRAEFYTKVNSILKKHENIAEATGLIELIDRNEFMPKQRDAVNGVIPHQLHQRELQLIIQNQQKYYPFLAAKAYPDADETMIEQLLSFRVPYYAGPLVDRDFINESSDQEQAMQNTKFSWLKRREAGEITPWNFEQKVDVQETANRFIKRLTTKDTYLMTEDVLPKESLIYQRFEVLNELNAIRINDRRLTAENKQLAFQQLFMAGNTKNVSIKKFRNFVFDSLKFPEKVKITGFAGQHNFLAKLSTYHDFKKIFGERVDHTDLQPDFERIVEWCTIFEDRHIYREKLKEIQWLSQSEIDQLVLIRNHGWGRLSKRLLTGIRDSDGRTVMDQLWFGTDNFMRIISQSDFAAAIANENRTQLNQHGLEDVLDSAFMSPQNKKAIRQVLKVVDDIEQTLGCPPKKVMIEFTRSPDKKKQRTVTRLEKVQQAYKAVADQLAGQSIVSELDQYANTHSKLSDTYYLYFMQLGRDLYSGKPIDIDSPMLDDDHILPRAFMKDNSLDNRALTEKPINNTKAAKFPSKVFGQQKEVTDFWKLLRRCGLMSNIKEKHLYLDPDNVDKWTRRGFIHRQLVETSQVIKIVANILNDRYQQSQTEVLEVPARLGTELRECFGWYKVREVNDYHHVFDAYLAAFIGNYLYRRYPKLQPYFVYGNFAELNKAQLKNIKSFNFLYNITDNKRVVKDIETGQTLWDDQIRQQIQHIYEYKYMLTSHEAFTQHKELYGQTIYPRREFKPGTLKAIKQDQPQELYGGYKNLTAAYMCIVKIQARKRRAAEYRVVRVATESLSALQQAKRLGVQAYERCLRQELVRNNEILRTNADPNSAPREFEVLLDRVLCHQMIISDGQKYLLGSHAYKINCMQLVLSNNSMKILSTSIVKLKQMTNEPLVQVYREILDVVNKYFTLYDVNSFRENLNQFFDKFRTLPITNEYESSKSGKKLIHRGQLETLTLILRGLHANSDKVQYGDQSTLLGGFQTKDGIKLSKDSVIQYTSPAGLNVRTVKLRDLEQKEAQK

SEQ ID NO: 244 - protein, 1361 aa, Lactobacillus pentosus KCA1
MNEPYGVGLDIGTNSVGWTVVDMNGRVRKVKGKTALGARLFKEGATAEDRRGFRTTRRRLKRVKWRLRLLREFFDQPISKIDPNFFARRKYSDISPRDPNYNGLAKTLFNDRTDKEFYDDYATIYHLRDKLMTSNRKFDIREIYLAIHHIVKYRGNFLRTGPASQYGSASLHLATSFQKLNDLFAQSEETLNLKLVTDEALLQQIQQILVRTDLSRSEQQRQIWPLMAVLTGASAAEKKRQKNVVVELSKALVGLKAKMNVVTLTEVDAAVVKDWTFTMEESQDKLPEIEEQLSEVGQQIMDEVIQLYASVNLAQLIPAGKRFSQHMVEKYKHHEKNLELLKAYIHSQSDSKRGREIRATYDRYIDGVDSKPVTQEMFYKDLMKYVEADATSNHLAAEIKDEIDSEQFMPKLRTKQNGSIPYQVQQYELDQIISHQKKYYPWLGEENPVAERRGKFPYKLDELVGFRVPYYVGPLITKEDQQATSGAGFAWMVRKADGPITPWNFDQKVDRIASATAFIQRMQTTDTYLIGEDVLPARSLIYQRFMVLNELNNMRVEDRKLAPQQKQRLYNQVFKQHQHVSVKNIQQNLMDAGEYRKTPQITGLADPKGFNSSLSTYHDFKKILLEAIADEHKRADIEKIILWSTTFEDSAIFKQKLEEVAWLTDAQRKQLSGLRYRGWGQLSHKLLTAFKDDKGRSIMDGLWETSDNFMQLRKQPAIETQIKEANQANLTDADIQDTINELYTSPQNKKAIREVMLVLDDIKNAMHGQTPSWIFVEAARGGGVAGRRTQSRSSQIVEAYKGTAKEIVSEKVQHELNEKIKAKADFNTRLVLYFLQNGRDLYTNEAINIDRLSEYDIDHILPQSLVKDDSLDNRVLTSARINREKNDTFASEKFGRKMGAQWRELHRNGLMTQRKLKHLLMRPDEISKHATDFINRQLVETRQVIKLVEELISSEYPAASIVAVKANLTHQFRQTFNFPKLREVNDYHHAFDASLTAFIGMYLLKQYPKLERFFVYGKFAKQPINLTRFNIIRKLAVAEKPIANIETGEILWDKTADIKYFEKLYNYKRLLVTHEVRENYGAMFKQTLFKASYNKSKTLVPKKNHMETSVYGGYSNQETAYLAIVRIPFKSGFKFIVVGIPTRMVAKIKHYQSLGATLNQATHKVIEPKFTKISRKTKQTVISDYEVVLPKVYLDQVVRDQVKGQMYRFSLGSDKEYHNVQELYLPLSIQQAFVGHYDESDDQRSNDLVKVYDAALKQLQRYFPLHLSRNFDQVASQAHQSFEGLKNNVQTSDKQLGKKEVLNSLFVGLHANATRSNLSVLGMSKDFGRIKSNGITLTDQAEIIYQSPTGLFERKVALKDL

SEQ ID NO: 245 - protein, 1358 aa, Lactobacillus plantarum EGD-AQ4
MKEPYGVGLDIGTNSVGWTVVDASGHVRKIKGQTGIGVRLFKEGAAAADRRGFRTTRRRLKRVKWRLRLLREFFDQPISKVDINFFARRKYSDVSPRDPNYNGLEKTLFNDRSDQDFYHDYPTIYHLREALMTQHRKFDVREIYLAIHHIVKYRGNFLRNDAATAYRSGTLDLQQHFETLNHLFSQADLELNLNLTTDVALLDSIKQTLVRTDISRSDRQKLIMPLLAVLTGATTAEKKRQKAVVTEFAKALVGNKTKIDVLTLTDIDATEAKDWAFSLEENQDKLPGIEDRFSEVGQQIIDEVIRLYASVNLAQLIPEGKRFSQSMVEKYKRHGEDLKLLKAYIRSQSDAKRGRAIRATYDQYIDGVKSKQVTQEAFQKALGKFVDADVDLNSWAAQIKQAIDSEQFMPKLRTKQNGAIPYQVQQNELDQIISNQKEYYPWLGEENPVIKRRGKFPYKLDELFGFRVPYYVGPLITKEMQAATANAGFAWMVRKADGPITPWNFDDKVDRVASATAFIQRMQTTDTYLIGEEVLPARSLIYQRFMVLNELNNIRVDDGQLTPRQKQRLYNQVFKKHKRVTAKNIQDNLVAAREFPTAPRITGLADPKVFNSSLSTYHDLKQVLPEAMSDVRKQADIEKIILWSTIFEDSTIFKQKLTEISWLTAAQLKQLGQLRYRGWGQLLRKLLTGLKDDNNRSIMDGLWETNANFMQLRSQPAIENQIKSANQANLTTADLQDTINELYTSPQNKKAIREVMVVLADIKDAMHGQTPNWIFVEAARGGGVAGRRTQSRSKQIVAAYQGTAQAIVRDQVQRELKEKIKNKANFNTRLVLYFLQNGRDLYTGDAINIDRLSEYDIDHILPQSLVKDDSLDNRVLTNARINREKNDTFASEKFGKKMGAKWKEMHRMGLMTKRKLDHLLMRPDEISKYATGFINRQLVETRQVIKLVEELINAEYPSTAIVSVKANLTHQFRQTFDFPKIREVNDYHHAFDAALTAFIGTYLLKRYPKLERFFVYGKFAKQPVNLTRFNVIRKLAKTDTPITDIDTGEVLWDKLTDIKYFETLYDYKRLLVTREVSENYGAMFDQTLLKASDNGKRLIRKKQSFDTAIYGGYTGKTLAYMAIVKVSTKKDVQYQVVGVPTTMVTQIEQLEQQGMTNKQAVTKVIEPLIAANNKKMLTYEVLLPKVRFEQVVRDRIKGQTHRFALGTDTYYHNIQELYLPLTLQRAFLGKQNESEVQLNQNLLTVFDATLAQVNRYFPLYEMNKFKKILNSARDQIELLEAKNQFVKNKLVLGKQGILTNMFIGLHANASYGDLKVLGVKIDFGKLQVPGGIKLTGDAEIIYQSPTGLFERKIALKDL

SEQ ID NO: 246 - protein, 1390 aa, Lactobacillus psittaci DSM 15354
MKEVKDYIIGLDIGTNSCGYVVTDKQNNILKLKGKTAIGARLFKEGEAAADRRAFRTTRRRLARRRWRLGLLEEIFDEEMAKVDSSFFRRLKESDYSPKDSRKQFNSIVFESSEADKDFYDKYPTIYHLRNALMHDDQKHDLREIFLAVHHIVKYRGNFLREDSVKAFKAAKFTLQGEDGIGPVDKLNDLLKEIYIEAAPELATDNLSKIEEIIKDKKLYKQDKLKQVATLLTKEADTKDKAKLNKDVAKQVANAFMGYMIIFDTIFNLSDVDSKDYKVKFSDANIDEKLDTLTSLLTDKQTEFVLELQNIYNTIVLNEIVPDGKSLSESMVKKYDDHKEDLKLFKAYLNSLTDVKKVKELKAAYVLYVNNRKANLLAAKKLLGKKADNMNNFEIFSKFVADNLDDSELANKIRARLDLGEFLPKQRTNQNGVIPYQLHQVELTQILEKQGKYYPFLIAPNPVESHRNNAPYRISELVSFRVPYYVGPLIDPNNAESEQDKANSSFAWMVRQKQGQITPWNFEEMVDTTESANKFIKRMTTKDTYLLGEDVLPASSLIYQKFVILNELNNIKVNGIKLTSEEKHQIFDELFKVQKSVSLKNLVNFLTAHGCVAPNVTGLSDGTKFNSSYSTYIDYRKIFGAEIDNKDKQADFEKMIEWSTVFEDRKIFKRKLEEITWLTPDQIKQVSSKRYSGWGRLSKKLLTQITDENGVNILQRLWNESENLMQILSDPVIKEKIVAANSSFTKATDMEDILAEAYTSPQNKKAIRQVMRVVDDIIAAAHGKKPSQIAIEFAREDQDNPQMTKSRKAQLDQIYAKISDEFLDNAVKNELKNMKDNKPLAKDKVFLYFKQMGRDAYTGEKLSLDNLQDYDIDHIYPQSFIKDDSFDNRVLVQRAVNNGKSDNVPVLLFGNKQAADLGMTIRQMWKKWLELGLISKRKFNNLITDPEKISSYMASGFVNRQLVETSQVIKLVANILQAKLPDTEIIEVKASYNSILRKEFNLYKSREVNDYHHAIDAYLTTIVGNYLYQVYPKLRPYFVYGQFKKFGKAESKEDDPVKKIKQFNFIYQLLWGKDDAICISHTDQQVFSRSDIINKLTTAYNFKYMNVSQEVYTNSNNVFKQTVFPIIERDTAKSRSLIPKKLDRPTDIYGGYSNNNDAYLALVKVDKKKGSEYRVVGIPMRAAAMLKASKNYDEDLRKVIEPMVMLDKNGKAKRGIEGFRVLVGKMPFKQAVLDGDKKFMLTGTNDMPNLKQLVLSQQNMKYILDYIDDIDCRKHKFGNKTQDGNKCLLEVFDEIIQIVDKHFELFDNRSFREKLRNSRVNFINLALSKKAEALLAILNGLHANSMRTTIKELKISDLGRIQSSVISPEAQLIYQSPTGLFERRVKVKDL

SEQ ID NO: 247 - protein, 1369 aa, Lactobacillus rennini DSM 20253
MDKPYNIGLDIGSHSIGWTVVDDNSKLVRIKGKLGYGVRLFDEGKTAEERRQFRTTRRRLKRRKWRLRLLREIFEPHIAPLDETFFLRQKQSNLVPTQKKLPQLSLFNDRSDAEFYHKYPTIYHLRNALMTEKRQFDLREIYLAIHHIVKYRGHFLNAAPAASFKSGKFDLENKFDQLNLLFASAYSDLDFTLRTDNVDQVKAILLNEDLSASTRQRQALPLIYQTSADQKAAKKLTKSLATELLKAILGLKAKFDVLTGIETDDTKAWRLTFNAEDFDDKLNELNVTDNEAATQIIEILRELYSSILLAAIVPENYTLSQAMMAKYNAHKQHLSLLRQVKTTLPAKKQKELQAAYDDYIDQHLPLDKFYAKLTKVLPKEKDTDNPQIIQILNLIDLDQFLPKQRTKDNGAIPHQLHQQELDQIIDNQKAYYPWLAQLNPNEKRQKIAKYKLDELVAFRVPYYVGPLIEAKTQQKTSGANFAWMIRKEPGTTTPITPWNFDEKVNRQASANEFIKRMTTTDTYLLGEDVLPKHSLLYQRFEVLNELNGIKIDQKRVTVRQKQAIFNDLFLKQPNVTVKKLQQYLQAKGEYASAPIITGLSDPKKFNSQLSTYHEYKKIFGGLIDDPDKQADFEKCIEWSTIFEDSQILKDKLKEINWLTPEQRHKVANKRYQGWGRLSKKLLTQLVDYNGQRIIDILWNTTDNFMQIVHSEAFDKAIIKENQALLTQYNPQAVIDDLYTSPQNKKALRQILLVVNDIQKALKGQAPSRILIEFAREGQENPRLSTQRKQQVENAYKEASDALLSSAEVRQELKGLDNKALANTRLFLYFMQGGRDIYTGKSLNIDDLSKYDIDHILPQAFIKDNSLDNRVLVSAKMNRSKSDQVPLNDFAEIRYGKQMRQQWEKMLRAGLITRKKYHNLTLNPESINKYTAKGFINRQLVETRQVTKLATNLLVDQYAEDDVQLITVKSNLTHQMREEFDFPKNRNVNNHHHAFDAYLTAFVGLYLLKRYPKLAPYFVYGDYQKGASQNSKWRNFNFLGNLHREKVVDKNTGEIIWQRDAGLGELNRIYNFKKILVTRALRVNRGPMFKQTIYKAEEDKSSGRGSKQLIPTKKNRPTELYGGYTNKETAYLCLVKEPHKKGDIYRICSVLNMWLTELDRIADPIAKAQKLTELLTPQFTTTKKKQGQKIPVVKPFKVVIPKILINQRFFSRGQELTVASPMYMHNEQELFLNKKTIKLLNGQLAKNEAHELAPKIYQQILDQVNDYFPLYDMYKFRDTLNASKEIFVNLPWQDQRQDKKISQSGQKSILNKILIGLHANAARIKLTELNFKSDFGLLSQRSGIAFSPDDQIIYQSPTGLFERRVTLKDL

SEQ ID NO: 248 - protein, 1368 aa, Lactobacillus reuteri Mlc3
MIKKDYNIGLDIGATSVGFAGIDEQYDPIKLKGKTVVGVNLFEEGQTAADRRSFRTTRRRLNRRKWRLSLLEEFFDPYITPVDPAFFARLKESNLSPKDNNKNFSRSLLFPDITDQKFYEEYPTIYHLRYALMTENKKFDLRAIFLAIHHMIKYRGNFLNSTPVAHFDTSKIDFANDFSKLNRLYLNEDPNNIFEINLQNVKEISDILLDHSIKKFDKQKQVAKLLLTSQNDKELDKRNKQIATQISKAILGYNFSLNEILKLEAVNKSKWKLNFSSADIDDTLPDLISELDESQESILNIILSLYSRLTLNGIVPSGMSLSESMIDKYGTHKEHLDLLKKYLKTLPIKNRKEIAEAYAEYVGNSLKKSGHISQEEFYKAVKKNLDKSETAQKILSLISEEKFMPKQRTNQNGVIPYQLHQKELDQIIVNQSQYYPWLAELNPVTEHKDAKYKLDELIAFRVPYYVGPLIDPKTIPQTEQGNKNASFAWMVRKENGQITPWNFDKKVDRISSANNFIKRMTTKDTYLIGEDVLPAHSLIYERFKVLNELNMIRVNGKKLSVSVKQNLYNDLFKQQKTINRKKLANYLQANLGIPERPQITGLSDPEKFNSQLSSYIDLQKILGSEIVDDPNKQDDLEKIIEWSTVFEDSRIYKVKLQEIGWFTEKQKNELVSHRYQGWGRLSKKLLVELKDKNGRSIIDLLWNSQRTFMEIQSRPEFAEQITNENQDKLTEDNYEDVLADAYTSPQNKKAIRQVIKVVDDIVKATGKAPKFISLEFARSDERSDRVKSRKTHIQKIYETTAKELLKDDQLIKELGSVSDLSDRLYLYFTQLGRDMYTGKPINIDEISTMYDIDHILPQAFLKDDSLDNRVLVRRQDNNAKSDTVPALKFGKMKPFWNKLQKHGLISKRKLNNLQTNPESIDKFKAVGFVNRQLVETRQVIKLAANILASRYPDSKIIEVKASLTHQMRESFNLIKNRDVNDYHHAVDAYLSAFVGQYLYNRYPKLQPYFVYGQFKKFDKQSTRIGMKTNHFNFLYDLEPEGKNVKIKKPTKIINKETGEIIGDRDELVAKLNRVYNFKYMLVSQEVYTRSGALFDQTIYPANSGKKLIPLKQNKTTAIYGGYSGSKAAYMSIIRLRDKKGGTYRIVGIPVRAVNKLNQAKKKSNEKYLAELKAVIEPQIAKTKKDRKTGQRVLVPQEFDVIIPEVMYRQLIVDGDQKFTLGGTIDRYNAVQLVLNQEILTFLEQPTKYKDADTKLLDIYDQIVNLVEKYFMLFDSKRLAAGRVAFEKLPTLQPVDKMPSKLIIIRRIIQGLHDNAARTDLKAINGSSSFGRLQKRNGIILSPNACLIYQSPTGLFERKVYLNTISPLK

SEQ ID NO: 249 - protein, 1361 aa, Lactobacillus rhamnosus GG
MTKLNQPYGIGLDIGSNSIGFAVVDANSHLLRLKGETAIGARLFREGQSAAERRESRTTRRRLSRTRWRLSFLRDFFAPHITKIDPDFFLRQKYSEISPKDKDRFKYEKRLFNDRTDAEFYEDYPSMYHLRLHLMTHTHKADPREIFLAIHHILKSRGHFLTPGAAKDFNTDKVDLEDIFPALTEAYAQVYPDLELTFDLAKADDFKAKLLDEQATPSDTQKALVNLLLSSDGEKEIVKKRKQVLTEFAKAITGLKTKFNLALGTEVDEADASNWQFSMGQLDDKWSNIETSMTDQGTEIFEQIQELYRARLLNGIVPAGMSLSQAKVADYGQHKEDLELFKTYLKKLNDHELAKTIRGLYDRYINGDDAKPFLREDFVKALTKEVTAHPNEVSEQLLNRMGQANFMLKQRTKANGAIPVQLQQRELDQIIANQSKYYDWLAKPNPVEKHRASKPYQLDELLTFRIPYYVGPLITPKEQAESRENVFAWMIRKDPSGNITPYNFDEKVDCPASANMFIQRMKNTDTYLIGEDVLPKRSLLYQKYEVLNELNNVSIDGRRLGADQKQRLIREVFERHSSVTIKQVAENLVAHGDFAKRPEIRGLADEKRFLSSLSTYHQLKKILHEAIDDPTKEHDIENIITWSTVFEDAAIFKTELAKISWLDSDTIKALSNIRYRGWGQFSRKLLDGLKLGNGHTVIQELMLSNHNLMQILTDETLKTTMAELNQDKLKADDIEDVINDAYTSPSNKKALRQVLRVVEDIKHAANGQDPSWLYIETADGPGTAGKRTQSRQKQIQTVYANAAQELIDSAVRGELEDKIADKASFTDRLVLYFMQGGRDIYTGAPLNIDQLSHYDIDHILPQSLIKDDSLDNRVLVNATINREKNNVFASTLFASKMAATWRKWHEAGLISGRKLRNLMLRPDEIDKFAHGFVARQLVETRQIIKLTEQIAAAQYPNTKIIAVKAGLSHQLREELDFPKNRDVNHYHHAFDAFLAARIGTYLLKRYPKLAPFFTYGEFAKVDVKKFREFNFIGALTHAKKNIVAKDTGEIVWDKERDIQELDRIYNFKRMLITHEVYFETADLFKQTIYAAKDSKERGGSKQLIPKKQGYPTQVYGGYTRENTAYLAVVKTVEKKADVYRVVRIATSQVAALKEARAQSTVKERELLKKFLTTKFTKIGKNGKKAITPFDIVIPRVPREQLFHNKRYGFFMVNSDTLMHNYQELWMSRSDQQILSKLVKSAKTVENGQVGRLFENIVEQINKYFPLYDINQFRKKLDQSKDIFSKLPLEGNGTTSGKRETIQNILTGAGTGAKNGDLKNLGIKTPFGFLQVPSGIVLDDDTTLIYQSPTGMLNRIVRLSEL

SEQ ID NO: 250 - protein, 1361 aa, Lactobacillus rhamnosus GG; identical to SEQ ID NO: 249

SEQ ID NO: 251 - protein, 1378 aa, Lactobacillus rossiae DSM 15814
MKTFAEEYVMDKSKPYGIGLDIGTNSVGFVATDAEGHLIRLKGKTVIGAYLFNAGISAAERRGFRTTRRRLSRVKWRLGLLREIFETHFQESMGENEDNDFFLRFKYSNISPKDPQFSTAKGLFNDRTDKEFYDQYPTIYHLRRALMTEDHQFDIREIYIAMHHIVKYRGHFLKEGRAKDFKVGDLRLLDNFKMMNEQIEEINPLWQLKLPTDDASIKSITAILLDNTQSQNDRQKAVTKVILATLVKASDKDINAARKRFVGELSKAMVGLKTKLWVLADVSQNGDWEIKYENYADFAETIGSGESDTIQSLFNEINDLYGVITLAGIIPKEAESFSDGMVRKYEHHRKNLELLKVYCAEQSDGKRGRQIRQTYDKYIDGVDSKQFTQEDFYKALSKFTAKDEATSENAKLIAQEIAVGTFMPKLRTKANGTIPHQLHQKELDAIIENQKKYYPWLGEVNPVESHRRALPYKLDELVSFRIPYYVGPMVTPTKGDPEKSKFAWMVRKEPGTITPWNFDQKVDRSASGEAFIQRMKTTDTFLIGEDVLPQQSLLYQKFEVLNELNKIMINGKPICREQKQRLFKQLFMQYKTVTVKKVQQNLIANGEESENVPITGLSDPLRFNSSFSTYIDYKDILGTAAVNDNAKQSDIEQIIAWSTIFEDAAIFREKLNDITWLNDDQRNKLSHKRYRGWGRHSRKLLAGLRDGEGQTIIERLWNTNDNFMQIQNDSEIARQITEANSSKMATAEGTDEIIDGFYTSPENKKALREVMKVVKDIQRAHHGQAPAWVYIESPRETPRPGQRTVSREQQLTDLYEGAAKEIVDDAVLNELKDKVKSKENFTDKLVLYFLQNGHDIYANDSINIDNLNAYDIDHVLPQSLIKDDSLDNRVLTTHERNLKKSNRFATELFADQRKKWEKWHRLGLISSRKLKHLTMQPNSVEKFAHGFIARQLTETRQIIHLTANVLSNLYQENDTKIVMIKAGLNSEFRRTFDFPKNRSVNDYHHAFDAFLTAKIGRYLLARYPKLEPFFVYGNFVKNPKAMKRLSSFDFIAQLAAKTDDTSHIDQRSLKQVPVVNEETGEIVWDKDIELAELDKTYNYKTMLVKRAQTENNAQMFKQTVFKARDNQNKTLIPVKNGLSTDVYGGHSQQAISYLCIVWVGQKKKYRVLGISTAHAGILNNFEKNYGRFEAKKKLQEIVSNTLDNADRNDFKIVAPKVLFEQVVEDDNMKFGLGSASDYRNVQQLFLSRKNQLLLANMMTDQIHDQDLVHLFDEIVGQMNAHFPIFDRGGYRSSLTQSRDKFLKLPFKKNEDLITKQEVIRRILDGLHANANRKDLKIIGSKGDFGRLGTKKIYLSKDAKLIYTSPTCLFTRTVPLSSL

SEQ ID NO: 252 - protein, 1375 aa, Lactobacillus ruminis ATCC 25644
MRKNQEPYNIGLDIGTSSIGWSIMNDNFDLMRVKGKKGIGVRLYNEGQSAAERRMHRTARRRYGRRKWRLRLLEDFFDEHMAEVDDTFFARLKDSNISPKDDKKYRKSLLFPKSKGVTYQDDGEFYKKYPTMYHLRYALMTEHRKFDLREIYLAFHHMVKYRGNFLYDTSVDSFEAKNLDIKGKFDEINDLLSSYTDFYVDNSNAALVESILLEKNTTRKDKSKKIAKLLHVEDKEKGKNKKAKDLATQISNAVLGLKCNFHLIFELQQKYSFDLCSEKTEENIAKLSEVLDENQKMLLMILKEVQDQVMLNAFVPSGMSLSEAMMQKYDDYGEQLKIYHELEHSVSDDSAAKLRGAYRDYNDNIIKRIDGDNKKDTFYKRVKNILTKISKEYVDQDVLESCGKLKKLIDENKLFIRQRTAANGVLPHQLHQIEMRKIIDNQKEYYPWLAEPNPNEKRRVYSKYKVEELIAFRIPYYVGPLVDPNNADKNKEARFSWMVRKKDGEITPWNFYDKVDWAESANNFIERMKSKDTYLLGEDVVPKESMLYQKYEVLNELNNLRINDSGLSDSFEDVKLKQAIYNDLFKKQKIVKITDLQNYLVQNHKYLVKPKISGLADENRFLSSLSTYSDLKTIFGDKVDDRTYFNDFEKMVEYSTVFEDGHDYNQKLDEYTWLTKEEKYKIGKKRYRGWGKLSKKLLTGLRDKNNHTIMDNLWETNRNFMQIQTADEFSKQIAEENERHLKGSVSDAINDMYTSPANKKAIRQVLRVVDDIQKAMGYAPSSISLEFAREDGPSVRTVSRANRMKSIYEKYASEVSEEVMKDLDGVIKDKKGLNDRLYLYFEQQGKDMYSGHPLDFDKVISGQEYDIDHILPQAVIKDDSLDNRVLTTKALNNDVKSKGVPCRMFNGMHSFWKNLYDKGFISRRKFNNLTTNPENIDKYKMKGFVNRQLVETRQIIKLVANVLNDKYQNDDVDIIEVRAELTHDVRKHFKFYKNRNVNDYHHAFDAYLTSFIGHYLFKKYPNLRPLFDYNDFMKVSDNVFKQLRGNNFLGEFLNKTGDIISTDGNFVLNKEEMINKLNKAYAFKKILVTKEVGQRTGAMFNETRYPAPNSRKAALKYRRMPKPDSLISVKDYKNTDIYGGYSGKNDAYMVIVDMGKQYMVVGVPVRYTEKLDKLRIKHSELYRDELRKVLSRDKTLLDSKGNVKRFDIVLDRVLYGQLIEDGNELFTLGSSKYKRNFRQLFLDKQCIEILDSSATPQPTDEELIWVYDQILDKVDKYFELYDINRQRETLRKGRAAFCSLPNISMKKDDVTKKKILNEILVALHANESESNCEKIGKKVFGRLQVPGGIKLSKEAKLIYQSPTGLFERVVYLKDL

SEQ ID NO: 253 - protein, 1369 aa, Lactobacillus sakei carnosus DSM 15831
MAKTYNIGLDIGTNSIGWAVVDDQNHLMSIKGKYGYGVRLYDEGKTAEERRSFRTTRRRLKRRKWRLSLLREIFEPQITPLDNTFFLRQKQSSLSSKDNRKLYPEMSLFNDRTDTDFYTQYPTIYHLSRDLMTKNKQFDIREIYLAMYHIVKYRGHFLNESPVSSFKSSEIKLAENFETLNQIFNERFNESMFQLAVNDFDDLKALLLNDQQSASNRQKKALGMIYVPNENKSLEKQNKAIATELLKAILGLKAKFNVLTGIEVDDAKPWTLSFNSESFDEDIDKAATNIDDDSREIIAILQGLYSGILLAGIIPENQSLSEAMVEKYDQHAAHLKQLKSIYPLLSISDKKAIQQAYNYYIDGQDNAKAYSREDFYAATTKALKSYQDNETIAEILKLIELEQFMPKQRTKDNGAIPHQLHQQELERIIENQQKYYPWLAELNPNESRRKIAKYKLDELVAFRVPYYVGPLITSEQQQQSSNKKFAWMIRKAEGKITPWNFDEKVDRQASANEFIKRMTTTDTYLLAEDVLPKQSLVYQRFEVLNELNGIKIDDVPITVEQKQRIFNDLFMMQASVSVKNIQDYLVSKGYFASRPEITGLSDENKVISRLSTYHDLKAILGGIVDEANKQADLEKCVEWSTIFEDGKIFVEKLNEIEWLTDEQRKRLSSKRYRGWGRLSNKLLNQIVNENGQRIMDLLWDTTDNFMRIVHSEEFDKLISAANQTLLSKNDVQDVINDLYTSPQNKKALRQILLVVSDIQKAMKNQAPSKILIEFAREDEANPRLSVQRKRQVEQVYQNISKDILSDSDVKAELKDLTNTALANTRLFLYFMQGGHDMYTGETLNIDRLSEYDIDHILPQAFIKDNSLDNRVLVSAKMNRSKSDQVPLNDYTEERFGSKMRVQWEQMLRAGLITKRKYDNLTLNPDRISKYAMKGFINRQLVETRQVIKLVTNLLMDHYEDDEVQLITVKSGLIHQMREMFDFPKNRNLNNHHHAFDAYLTAFVGIYLLKRYPKLTPFFVYGSYQKNNTNDKWRNFNFLNDLKKEEVIDSDSHEVIWNKAQGLVELDKIYQFKKILVTREVHENTGALYNQTLYSAKDDKASGQGGKQLIPAKQDRPTALYGGYSGKTVAYMCIVRIKSKKEDTYKVCGVKTSWVAELERLSDSNEQLASLKAKLMPKFTKNKKQKGKTIQVTEDFEIIVPRVLINQRFYDNGQEITLGSATYKHNEQELMLNKKAVKLLNGQLSLVEAETLAPQVYDEILKQVMKYFPLYDTNQFRTKLKMGKEQFIKLPWKNKWDGNKLIHVGQQTVLDRILIGLHANAAVSDLSTLKVTTPFGKLQQPSGIALSLNTKIIYQSPTGLFERRVALRGL

SEQ ID NO: 254 - protein, 1149 aa, Lactobacillus salivarius UCC 118
MERYHIGLDIGTSSIGWAVIGDDFKIKRKKGKNLIGVRLFKEGDTAAERRGFRTQRRRLNRRKWRLKLLEEIFDPYMAEVDKYFFARLKESNLSPKDSNKKYLGSLLFPDISDSNFYDKYPTIYHLRRDLMEKDKKFDLREIYLAIHHIVKYRGNFLEKVPAKNYKNSGASIGFLLEEVNDLYGNIIGNEDVAILDNDKFEDVEKIILNDEIRNIDKQKNVGRLLVKDKKEKNIVTAFSKAIFGYKFNLEDLLLIESDEKNKLTFNDENIDDIFNELSHSLNDNQMDLLTKTREIYFKFKLNMIVPTGYTISESMIEKYEMHKAHLKMYKEFINTLNAKDRKILKNAYSDYINNEKAKAANAQENFYKTVKKTIKENDSDTAKKIIGLIDEGNFMPKQRTGENGVIPHQLHQIELDRIIENQAKYYPWLAEENPVEKNRKFAKYKLDELVTFRVPYYVGPLIDKTESNKNEKETKFAWMVRKAKGTITPWNFENLVDRTESANRFIKRMTSKDTYIIGEDVLPASSLLYEKYKVLNELNNIKVNKKKLDVEQKQHVYLDLFTTRKNVTKDDLATSLNCDVESITGLTDNKKFNSSLSSYIDLKAILGNIVDDYSKNEDLEKIIEYSTIFEDGNIYKEKLSEISWLTDEQIEKLSNIHFKGWGRLSKKLLTQITNENGERIIDTLWNTSNNFIQVISDESIQAKLAEINGEYANKYNLEDILDEAYTSPQNKKAIRQVMKVVEDIEKAMKCEPTSIAIEFTREKRKSKLTNTRYKKISETYEKITDELISEYELGKLQSELDSKVNNMRDRYYLYFMQLGRDMYTGEKMNIDELHQKYDIDHILPQSFIKDDSLNNRVLTSKSVNIKEKSDKTAADLYAAKMGDFWRKLRKQGLMTEQKYKNLLTRTDSINKYTKQSFIKRQLVETSQVVKLAANILQDKYRNTKIIEIRARLNSDLRKKYELIKNREVNDYHHAIDGYLTTFVGQYLYKVYPKLRSYFVYDDFKKLDSNYLKHMDKFNFIWKLEDKKAEDVYDKVNDEFVLNVPEMKEYIRKIYNYKYMLVSKEVTTKNGAFYDQTKYNAKTINLIPIKKDKPTNIYGGYKGKVSSYMMLVKIQKKKEVIYKFVGVPRLWTDELDRLIDTDEKKALLKK

SEQ ID NO: 255 - protein, 1331 aa, Lactobacillus sanfranciscensis DSM 20451
MNKQPYNIGLDIGTSSVGWSATELDNRLLHIKGHNGIGVRLFKEGESAADRRGFRTTRRRLARRKWRLRLLNEIFATEIAKVDPSFFARLKQSNVSPKDPNKTMFENILFDDENLDDQKFHHDYKTIYHLRQAIINHPEQKFDIRLIYLAMHHIIKYRGHFLNQANVQDFKGGKIDLEKSFKALNDIFENQGRDLRLVTDKANQYVKVLSDNAKTRSDRKKELSKLLYVPIDKDTDKNSKKVTGEILKAILGNKAKFDVIFGIEVENPKEWVLTFNSDDFDDKIEGLSSQMTDEDSEILLILKELYFALNLSDILNNSVTDKNAKTLSEAMINRYDDHKNQLAMLKKVIDSSDKKHAKELKEAYSAYIDGENNKKISFEDLKKRIQKNLVDSELSQKINDLLDHDYFLPKQRSKENGAIPHQLQQQELDQIIESQKQYYPFLAELNPNEKRSRQAKYKLDELVAFRVPYYVGPMVEVTDSNQENNGKFAWMIRKEQGEITPWNFDEKVDRTETATKFITRMTTTDTYLIGEPVLPKNSLLYQKFVVLNELNNLKINQEIITPGQKQYLYEHVMKKNKRVTLKKIADALVIKGDYPYAPEVKGTTDQKNLNNGLTTYIDLAKIFGNELDDVDREADFEKIIEWSTIFEDQHIFALKLQELKWLTEKQRNQVVKLRYQGWGKLSKELLAGLVDDNGQRIIDLLWSDNQNFMQIVNQKSFKESIADHNGAHLEEKNLKDVINDLYTSPQNKKAIRQVILVVDDIINAVGYEPANIMMEFAREDSNDHRLTNSRSRQLENVYKDITNSWFDNDSVKDELEDKIKNKDKFTDRLYLYFTQGGKDLYTGEPLNIDDLSSYDIDHILPQSFILDNSLDNRVLTSQRNNRVSKEDQLPGELFGTKMHAFWKRLKAAHLISNKKYYNLTLTPNSISKFNNQGRFINRQLVETRQVIKLAAEILHNRYSEEKGTNIVTIKANLTHHMREKFNFYKNRNVNDYHHAFDAYLTAFVGNWLLQQYPKLKPYFVYGDFAKTEINNLKSFNMLYKFEQAHQLNEKDGKIAKDADALLGYMKNVYHFKKMLVTKKLETNHGALFKQTLYPSPAHDIKKRQLIKPKDNRPTDIYGGYTHEERKYMSLVKVIGKKDNEYRMANVPLLKINKNNDIKEILKSQFSNKKFEIVLPKVLKNQLFSENGALFVIGSKGYKYNANQLVLSDLDMKLLNDLSNNKSIDEVTINQLFKNIVDSTNKYMPLYEIKNLNEVVEKFNNLEFNDKKKTITDFLLATHANPTMSNLKNIGLPSYFGRFTSGNAGIKLSENANVIYQSPTGLFSRKVKISDF

SEQ ID NO: 256 - protein, 1346 aa, Lactobacillus saniviri DSM 24301
MVEHYAIGFDIGTGSTGFAGVDPNGKLVRMRGKNVYGVYRFKGGEAAADRRGFRTTRRRIKRRKWRLRFLKSFFEPYIAPIDPEFFLRQKYSADSPLDPKGIRADKGLLSDMSDQEFHAKYPTIYHLRYQLMHEKRQFDVREIYLAMHHIIKYRGHFLIEDGADNFDAKQIDFFDQFQRMAAVTAGLPELETLVVPDETQSDAFKRVLFDESQTKSDRQKVLASQLLDIQDNQSKAIKDFIAALTKAVVGMKANLATLTSTAIESTDKNDWTKPLGQLDDFLLKHEEDLDEDGYALIDAANQMYSAAVLAALVPEGMGFSEAMMARYAQHKKQLALYKQVIASLPDKTQRHELKDAYADYIEHAAQNPRDAFYKRVTKVLEGVDSADARTVMTAISHDEFLLKQRTLSNGKIPYQMQQHEFDAIIENQKAYYPWLATPNPVEADAKRLPYYLDELIGFRVPYYVGPMVTEKQSQFAWMIRKADGELTPWNFFDVVDREKTANRFIQRMQTTDKYILGEDVLPKHSILYQQFEVLNELNNIRVEKHPLTTEQKQFIYQRLFVDQQRKTITKKNLQDTLVAMGEFDKAPDIGGLAKEDVMMSSLATFADYSKILPEAISDPTRQNDIEDIIAWSTIFEDTQIFFDKLKTVDWLTTQQRKRLASIRYTGWGKLSKRLLQQIPTSKHTNVMAALWATSDNFMQILQDEQFQEGLYDANRLPEETLTPDEQVEKILDEAYLSPADKKGARKVIKVMNDIVRANHGVLPEQVFLESADDPQKNKRRSVSRSKQLEEKYRQAAQSFIDEAVKEELNAQIVNSAEFNDRLVLYFTQNGRDMYTGKRLDIENLGSYQIDHILPQSLVKDDSLDNRALTARDINAEMSNQFVSERFGLGPRAFWQQLKNNGLISGRKFRNLVMQRDEIDKYAPGFINRQLVETRQIIKTVEQIIHRLWPDIQIVTIKANLTHQVRSELGFPKVRELNDYHHAFDALLAARIGQYLLEHYAGLKPFFTYGEFKRGDTKKYGTTNFLRRLTKDNKDKKGELLPEVSDWIDSIDSIYNYKKIPVVWENTTNMSALFDQTIYPRPDRDTTKRKLIPTKLDKPTDIYGGYSSAKTAYMAVMRVQTKKGTEYPVFNIPVSIASQLNRITDQTMLKQQVKQFIINAEQSASKKKLYESGDVILSRVALGQRFTDKNYGEVFLISNMEVQNPQSLWLGRASQQRLTREPEGNEKPETSLADIYQQILKQVDRYFLAFNIRQQRQKLLGTLDQFTSLPVGRVNEQTRTDQNQRSIIARVMIVLGKGSREEKFPEFGLSALGRLVRTGGITLSEDAQIIYQSPTGLFERRVALKDL

SEQ ID NO: 257 - protein, 1345 aa, Lactobacillus senmaizukei DSM 21775
MVEKYGIGLDIGTSTLGWTSVDENGKIQRLKGQTALGTRLFNEGQTAEERRGFRTTRRRIQRRRWRLRLLREIFDEPIGSVDAGFFARQKMSSLSPQDDRFEDTYRLFNNQTDKAFHDEYPTTYHLRQALMNSDRQFDIREIYLAIHHIVKYRGNFLRSGKPADFKTGKLDLKEKFEEINADWQTLISEDAPQLPVDDLTTIKAVLVDGSRSRSDRQRGLVKLWMANETVEKNWKPVMTELAKAILGLKTKLYLLTGLDLPKEDQKAWTFSLDTLEDHQGDIDSFFDDHAQQLIDRLAELRAMIQLTEIIPSGLNFSQSMVQRYEAHRSHLEMYKQYALDQTDPKRTKALRAAYNAYIDQHEIADDFYTAVKRVTKDDQSETAEEINRLIGLEQFMPKQRTKENGVIPYQVHQQELDQIIAHQKKYYPFLGTENPVIDHRESQPYMLDELVSFRVPYYVGPMVAANPELKTTENPFAWMIRKAQGEITPWNFDEKVDRKGSATAFIERMKTTDTYLLGEDVLPQQSLLYQRFMVLNELNNIRIDDELLTTNQKQWVFDRVFKGKGTISAKHLQDALKHHGETDGLPKISGLADPTKFNSALTSYRDFQKWLPNDIDRKDRTADIETIINWSTVFEDTHIFVEKLKEIEWLTADQRRRIASNRYRGWGRLSKHLLTEIKDEQGLSIMDQLWRTQHNFMQIVHEPDYAKQIEAANTVGMAKQDIGTVINDLYTSPQNKKAIRQVLAVVKDIQNAHHGVAPSWIFMEAARGADQNPQRSRQRQRQLQDLYAKTAADLVDTEVQQELTDKIKDKANFTDRLMLYFLQNGQDMYSKEKLNIDRLSEYDIDHILPQALIKDDSLDNRVLVHQSINRNKSDTFASEKYGAKMQGAWHQWRAAGLISARKLRNLEMRPDEISKYATGFIRRQLVETRQVIKLVTEILSHQYNPEETKLVSVKAGLSHELRREAGLPKLRDLNDYHHAIDAYLAARIGTYLLKRYPRLERFFVYGQFQTSRLDLRRFNFIHDLVKSKQGVIVDSDTGEILWDRQKDIDYIKHLMGLKHLLVTHEVYDSAAEMYAQTIFKASDNDSKVLIPTKNDRPTAIYGGYTKRRNGYLAILKITEKKAETYRVVGVPTLYMSQLATARSHSVEAEKALLKSLMAPEILSESKVVSFEVVVSHVHLNQLVRDTVFGPAHYFGLGPFRYVRNFHQLVLPFKDQEILVKRTPTDEELNTVFEDICWQVENYFAVFDINGFRNALKKSIDKFEQLPIENVFKDKKLVTQGKKEVLAFVMQGLHANASYRNLKVSLGIKTPLGQLQLTKFMLSRDAELIDESPTGLFRRIRRLKDL

SEQ ID NO: 258 - protein, 1138 aa, Lactobacillus tucceti DSM 20183
TCVFLVKLGGFEVDRKISLGLDIGVSSVGYSVIDVDTGKVLELGSRLINGKIGTENQARREMRGTRRLINRKKQRRKDTVKLFNEFKLIDSKKDEHYFDHFANNSDPYELRVKGLSEKLSLSEIADGLYHIVKRRGISYDLKDADEESEGSEYENGLKINNSELKNQTPAQIQLKRLNEYGAIRGKVVIDEEKILLNVFPTKAYLDEAKRIIEKQREFYPGILTEEFEEKYCQILTRKRDYFVGPGSEKSRTDYGIYKEDGRTLNNLFEELIGHDKIYPEELRASGASFTAQLFNVLNDLNNLHISSYEDQKLTTENKEQIISELKSTTSNVNMMKLIQKIAGCEESDISGYRTDKNYKPEISSMRIYRKVHKKLLESEIDITNWPDDFINKLSFILTLNTENGEIRNQLKNRLQPEYDFLTDELIQTIIDNKESFDIKSNNKWHRFSIKTMELLIPEMIKRPVEQMTLINEMGLIKNSGKKFSNYKYLPYKKIAEDIYNPVASKSVREALKIVNAILKEYGHIEYIVVEMPRDKNEDEAKDQIEKFQKANGRLKDAALEEFTEAIGDKSTVDKKLGVHRSKLLFKIRLWYQQRGMDLYEGKPISAVDLLNNPDSFQIDHIIPQSVSFDDSFNNKTLCNSGLNQIKDKKTPFEYMNEGYGQGFDSMKAMVMKNPRIDHNKRKNYLFSENVSDIETRKRFISRNLVDTRYASRVVLNNLQEFFKEKESDTKISIIRGKFTSNLRKHWKINKNRDTYHHHAIDATIIAATPFLNIWKKGSSIFPSNVESEDFFDIKTGKIIGNDEFNKYAYDEPYNGFYNELRNATDRIKFSHQIDKKMNRKVSDSTIYSTRVAKSPKNKKESEYIVAKIKNIYDADEYAKFKRIYDKDKTKFLLNKYDPRSFNHLEKIMNTYPDSIERTMSNNKVKVVRISPFELYRQDHGPVKKYSKKNNGPEIKQLKYLDKKVGSSIDVTPDNAKNKHVILKSLKPWRTDIYLNHETGEYEIMGIKYSDLKFNKGEGYGIKKAKYLEIKHREKVSDDSEFMFTLYKKNRIKVENMDESVEMLFWSRTMDSQKGYAELKPIYKYKTEDDNWPIYGNAKKQIIKKLIPKNCKIWKVNTDVLGNPFYVEKEGEYPKDVLD

SEQ ID NO: 259 - protein, 1313 aa, Lactobacillus versmoldensis DSM 14857
KNNLWGARLFKEAETAQVTRGHRSMRRRYRRRRNRLNWLDELFADELAKIDPSFLLRMKNSWVSKKESTRKRDPYNLFIDEKYNDVDYFNQYPTIFHLRKELITEDKKVDIRLIYLAIHNIIKYRGNFTLENQNFDISQLSSNFSQQISDFFALFSDFGVIMPEDFDPDKISDILLNPNLSPSGKVSEAIATISPKTNVKAKIKIILLLLVGNNGDLKKLFDLETTEKIAVKLSSRHIDSELPIILSELNEQQENIITIANSIFGSIILKDFLGDETSISAAKVISFEDHKQDLQKLKTMWRETSNKEAVKAGKKAYEDYIGHEDSETFYKKIKKFLEKAQPVDLANKALAEIELENYLPKQRNRNNTVIPYQLNENELIAILDHQEKYYPFLKENRDKILSLLTFRIPYYVGPLQDSNNNRFSWMTRKASGAIRPWNFSEKVNVEQSSNDFIKRMRSTDTYLIGEPVLPKKSLIYQCYEVLSELNNTRVKDGSSNPKRLDVTIKQRIYNEIFKNQKSVSVKVLQNWLIKESYFKSPEISGLADKKKYLSSLSTYIDFKKIFGQRFVDDPVNSPQLEELAEWLTLFEDKKILLIKLQNSKYSYDQATINKLSTMRYQGTGKLSKKLLVDLKTTKKSIGKSGAESLSILDLMWSTKDNFMQIIHDADYTFEQQIKEFNYDTEDELTPLEKVANLHGSPALKRGLNQSIKVVADIVKFMGHDPEKIFIEFTRSDDFSKLTISRYRRIKKQYLEIAKAIKKIPAEFKDIKEYQTQLEENKGKLASERLMLYFLQCGHSLYSNKPIDLNMINSSKYHVDHILPQSYIKDDSLENKALVLASENENKIDNMLISHDIIATNLPRWQALKDQNLMGSKKFADLTRTTVTENQKKGFIQRQLVQTSQIVKNITLILNDLYKNTSCIETRATLSSEFRKAFSNFDETTYHYQFPEFVKNRDVNDFHHAQDAFLACVIGEYQLKKYPKDNLRLVYDQYSKFLDSLKKDTRKKNGRMPRYTQNGFIIGSMFNGKTYVDDNGEIIWDQKIKESIRKTFNYHQFNVVRQTIEQHGKLFNDTIQPHSDRYKLIPLKTNRDPAIYGGYNNDNNAYSVVLDVDGKKKINGIPIRIANQLKSDELDLSSWLENNIKHKKPMTILIDKVPKYQRIINEETGDLLITSANEVINNVQLFLPSMYTALISLLDSTKTEMYSKLLSNYEANILIDIYDYLLTKLKNNYPLYRKEWAKLAEHRDDFIESDLVTQASTLQQLIKFMHADPSNVNLKFGNFKGNRFGRKNGNIKLSKTDFIYESPTGLFKSIKHID

SEQ ID NO: 260 - protein, 1356 aa, Lactobacillus zymae DSM 19395
KGFINLYKKYGIGLDIGTSSIGWSVVDEYGHIIRVKGQTGLGVRLFREGQPAADRRTFRTTRRRLGRRRWRLRLLREIFDPYIAAQDPNFFARQKASAIAPGDSRFKAVYRLFNDQTDRQFYDKYPTVYHLRQKLMTEKRQFDIREIYLAVHHIVKYRGHFLTGGAAKNFKPGKLDLNTYFATINAQLAAIFMDSQVELPQLDWDAVVSLLTNDQESPSDRQKALTKMLVAQGDATQKRFYTEFSKALLGLKAKLYVLTGFEGDKTDQKALTLSLETLDDHQDDVTQLLGDEQRQLVELLARVQSAIQLAIIIPNGKTFSGQMVQQYQTHYDQLRLLKDYREQLTDQKHRRALKQAYADYLANDQDQDALVKAVEKVLKQNQPLSTVGVRLQTAIDAGDFLPKQRTKANSVIPHQIHQQELDRIIEAQSVYYPWLAEENPVAAHRSYAPYKLDELVDFRVPYYVGPLVQPQADKAAKETKFAWMTRKEAQSTTPITPWNFEQEVDRNASANAFIQRMKTTDTYLLGEDVLPKNSLLYQRFEVLNELNNVRVDGKLLTIAEKQRLFQDLFVDRSQASVTIAQLQANLIAHGAAKDRVEIKGLADPKRFLSSLTTYHDYAQIIPEALEQPDKRADIEKIINWSTIFEDTSIFKEKLQEIAWLTPDQRRQLSQKRYRGWGQLSDKLLTQLRDATGQSVMDLLWTEPNNFMQIIRRTEFQQAIARVNQTDLKQQDLATTINDLYTSPQNKKAIRQVLLVVADIQTAMHEVAPSWLFIEAARGPEQNPKRKLARQQQLLEAYKTSAKEIVNEAVKEKLLSAIDDHQKFEDQVVLYFQQNGLDMYTGKPLDFERLSKYHIDHIIPQSVVKDDSLDNRVLTTPEENERKGARVPGPLYASQQGRWRLLQRAGLISQRKLDHLLLRPEELDQQATGFVARQLVETRQVIKLITNILSQQYDPEQTKLVSVKAGLSHQFRTRLNLPKLRELNDYHHAHDAYLAARIGTYLLQRYPNLERFFVYGQYQKTRFDLKRHFNFIGEMLKGKPEDAVIVKAPHSETVIWDKQDEVKQLKKIMEYRHLLVTHEVYDNHGALFNQTIHPAKNPKNRKLIPRKTTQSTELYGGYSGETTGYLAIARTVTKNKISYQVLRVPTRLVGRLQRSSESAQRQILTDWFAPSFVSRGKQQPFEIVLRHVFKNQTVIDDIHEQSHRFGLRSDTYYCNQQQLVLSLEQQRMIIDQKLNNTNKLMVVYEAVCDQVAKYFPLYRMNHFKESLLEAGPKLAELPINTVQSKNGKLKLGQRSVLLQTMQGLHANPETKDLSIIGCPKYFGKLQVSSGIKLTENAVLIHESPTGLFQRRVRLSDL

SEQ ID NO: 261 - protein, 1355 aa, Leuconostoc gelidum JB7
MTYSIGLDIGTGSVGWAVIGDDYRLKRAKGKNLIGVRLFDSATTAAERRGYRTTRRRLSRRHWRLRLLNDIFASDLAEQDENFLPRLKYSWVNPDDEQNPQLNSDVANGALFGSSETDKAFHKNYPTIYHLRHELMTDTAKHDLREVYLAIHHIVKYRGNFLNTADKINAENSFNVDLFIAALDEYNEFLETPITSIKDAQLFSDKLTDINARNKSVRVENAMSETYDDKSKIFKAILTALVGNTANFQTIFDLSDLEKDEAKNFKFKLDLEDVETKLDVVRAKLSDEQNAFLEAVLIAYDGITLKMILGDYKSISQSMIESYKSHQRDWKYIKNNVRLNEQKIEPDKNSVKFFKLDPKKLIYPSNLAYLQVISSNEDEHRKGLDYFKTAIQDADILQRIENDTFLPRQRTKRNGVLPYQLHLAELEQIIKKQSKYYPFLANIYTQDNKTENKLIGLLKFRVPYYVGPLVEAEKVTGDGKNHWLIKKELQENTPITPFNFDDVVDKDKSGEQFIKRITGTDSYLIGEPTLPENSLLYQKYNVLQELNNVRNERHQRLPIKVKQDIFEHVFKIDKNVNAKKVMAYLKLNGYGDFQIAGLSDTRTGKFNSNLSSYNYFVDLLGREKTEKIREDRLEEIIEIQTVFEDKILVAKRLSNLDFLTPQEKSKLSAKHYTGWGRLSQKLLTTQFIKTALSEAGDIIPQSHSIIDLLYYTDKNLMEILNDKTFNVRNWLTEQNKGTESGNSLYDQIDALAGPKDIKRGITQVFSIIDDIKKAMGSNPETVYLEFARETQTSRLTNSRLNRVQEIYNSPELKTEFAYLAKKLEAETKESIHDDRLYLYYLQEGRDMYTGKEIPFDQISSNYDIDHIIPQAFTKDDSLDNRVLVNRATNARKSNSPTFTNDIIDNRKSWWQSLVKRGLMSKEKFERLTDKRKTFSENQTNHFIARQLVETRQIIKNVADLIKNNYDGTQAVAIRASLTGEMRRYLDWPKNRDMNDYHHAHDALMMATVGKYVDRRGFFDNGSVSDGAGNAYNLYTKDWLVAARVGTRNDSQRVNPYGFIVGSMNSKAVRQQVNKETGEIVWGNENLDYLRHVLSYKKILVTRRLSGSSGRLYAETLFSPNPKAKLIAQKANRSVALYGGFTKAESAYTALVEFNKKGDRSYKLIKVPMAIANRVNDKQITVTAYIASLNLRDFSRVVLEHLPLGTLIRESDGSEFYAASSEYKHNAKELWAPKEILRSSKKLDKATADNLIDIFDFLTNDKTISNFKFYEKDLLHLKNVRDKFVEASDEIKIKVLSDVIYELHNDAGWRDPFKHIQEKPAWTMLQVKGGIKLSEKAAIVYQSPTGLFETITIVGE

SEQ ID NO: 262 - protein, 914 aa, Leuconostoc pseudomesenteroides 4882
MKYSVGLDIGTGSVGAVIGEDYRLKRTKGKNLIGVRLFEGADTAAERRGYRTTRRRLSRRRWRLRLLNDIFASELSKIDENFLPRLKYSWVNKNDTDNVHFGVGVFDNSEQEKAFYQDYPTIYHLRQKLMTDNRQHDLREVYLAIHHIVKYRGHFLNSGEISANSSFDAQKFLELLREFDNTFYPDAVKFLNLDQLDLPDKISSEISDSKISKSERVDRVLQHVQLANSGAKKILKAILNAVVGNSVDSVAMFSLSDLDKEEKKKINHPVTDSKPFKYSDKEVEAKLDELSNLLQDEQKIEFLSLLKLSFDGLTLKMLLGNAKSVSEAMVERYKVHKDDLKFIKENILNSFSKDKKKEFDKYYEAHLAEKDVDNVDKYFKKIIDDSIISKDKKIELLQKIDDHDFLPSQRSKINGAIPHQLHRNELDKIISQQSKYYPFLADSYTQNGKTETKLAGLVNFRVPYYVGPLVSKENADRNNPDGGQNHWVEFKENTSLSNLTPWNFNEIVDKDKSAAKFIERLTGMDTYLIGEPTLPQNSLLYQKYNVLQELNNIRVDNHKLDVKIKQDVFEHLFKTQNSVSAKDVKNYLIANGYAAPSIQITGLSDTNEKTFNSKLSSYNYLVDKLGRTFVESVKSDVLEKIIELQTVFEDKTVLLRQLSMISELTLAQANQLAEKHWTGWGRLSRKLLSSKVVDVNKITNSTFYPATSRQTIIDTLYHTQLNLMEIINNAEDLYGVRQWISEQNKSDSSDTNDVYDQIQELAGDKKIKRGITQSFRILDDIVKAMGGEPERVYLEFARENQQSGVSFSRKNLLSKLYENDSLKQTFKELKSQLESETKENLQNDRLYLYYLQQGRDMYSNDELNIDQLSSYDIDHIIPQAYTKDNSFDNRVLVSSKANRLKRMLLWYPVKLSKK

SEQ ID NO: 263 - protein, 1392 aa, Oenococcus kitaharae DSM 17330
MVFMARDYSVGLDIGTSSVGWAAIDNKYHLIRAKSKNLIGVRLFDSAVTAEKRRGYRTTRRRLSRRHWRLRLLNDIFAGPLTDFGDENFLARLKYSWVHPQDQSNQAHFAAGLLFDSKEQDKDFYRKYPTIYHLRLALMNDDQKHDLREVYLAIHHLVKYRGHFLIEGDVKADSAFDVHTFADAIQRYAESNNSDENLLGKIDEKKLSAALTDKHGSKSQRAETAETAFDILDLQSKKQIQAILKSVVGNQANLMAIFGLDSSAISKDEQKNYKFSFDDADIDEKIADSEALLSDTEFEFLCDLKAAFDGLTLKMLLGDDKTVSAAMVRRFNEHQKDWEYIKSHIRNAKNAGNGLYEKSKKFDGINAAYLALQSDNEDDRKKAKKIFQDEISSADIPDDVKADFLKKIDDDQFLPIQRTKNNGTIPHQLHRNELEQIIEKQGIYYPFLKDTYQENSHELNKITALINFRVPYYVGPLVEEEQKIADDGKNIPDPTNHWMVRKSNDTITPWNLSQVVDLDKSGRRFIERLTGTDTYLIGEPTLPKNSLLYQKFDVLQELNNIRVSGRRLDIRAKQDAFEHLFKVQKTVSATNLKDFLVQAGYISEDTQIEGLADVNGKNFNNALTTYNYLVSVLGREFVENPSNEELLEEITELQTVFEDKKVLRRQLDQLDGLSDHNREKLSRKHYTGWGRISKKLLTTKIVQNADKIDNQTFDVPRMNQSIIDTLYNTKMNLMEIINNAEDDFGVRAWIDKQNTTDGDEQDVYSLIDELAGPKEIKRGIVQSFRILDDITKAVGYAPKRVYLEFARKTQESHLTNSRKNQLSTLLKNAGLSELVTQVSQYDAAALQNDRLYLYFLQQGKDMYSGEKLNLDNLSNYDIDHIIPQAYTKDNSLDNRVLVSNITNRRKSDSSNYLPALIDKMRPFWSVLSKQGLLSKHKFANLTRTRDFDDMEKERFIARSLVETRQIIKNVASLIDSHFGGETKAVAIRSSLTADMRRYVDIPKNRDINDYHHAFDALLFSTVGQYTENSGLMKKGQLSDSAGNQYNRYIKEWIHAARLNAQSQRVNPFGFVVGSMRNAAPGKLNPETGEITPEENADWSIADLDYLHKVMNFRKITVTRRLKDQKGQLYDESRYPSVLHDAKSKASINFDKHKPVDLYGGFSSAKPAYAALIKFKNKFRLVNVLRQWTYSDKNSEDYILEQIRGKYPKAEMVLSHIPYGQLVKKDGALVTISSATELHNFEQLWLPLADYKLINTLLKTKEDNLVDILHNRLDLPEMTIESAFYKAFDSILSFAFNRYALHQNALVKLQAHRDDFNALNYEDKQQTLERILDALHASPASSDLKKINLSSGFGRLFSPSHFTLADTDEFIFQSVTGLFSTQKTVAQLYQETK

SEQ ID NO: 264 - protein, 1378 aa, Pediococcus inopinatus DSM 20285
MKNKDYSIGLDIGTSSIGFAVVDENNHVMRVKGKNAIGVRLFDEGKPAADRRAFRTTRRRLSRRRWRLKLLREIFDSYITPVDEAFFIRLKESNLSPKDSKKQYSGDILFNDRSDKDFYTKYPTIYHLRNALMTEHQRFDIREIYLAIHHIVKFRGHFLNATPANNFQVGKLDLDQKFEDLNDIYQRVFPDDSIEFRIDNLEQIKAVLLDSKRSRSDRQRSLVDDVYQTSEDKEVEKQNKAVATEVLKAILGNKAKLNIIANVEVDKEAAKEWTITFDSESIDDDLAKIDGQMTDDGRAIVEILRSLYSGITLSAIVPENHTLSQAMVAKYDLHKKHLTLLKKLINSMTDTKKAKNLRAAYDGYVDGVKGKVLTQDEFYKQIQSNLDESVEASEIQTYIDQDIFMPKQRTKANGSIPHQLQQQELDQIIENQKEYYPWLAELNPNPDKKRQQLAKYKLDELVTFRVPYYVGPMITAEAQKKQSGAEFAWMIRKESGNITPWNFDQKVDRMATANQFIKRMTTTDTYLLGEDVLPSQSLLYQRFEVLNELNKIRIDRKPISVELKQQIFNDLFKKFKNVTIKHLQDYLVAQGQYSKRPLIEGLADEKRFNSGLSTYNDFCGIFGAKLVDENDRQADLEKIIEWSTIFEDKKIYRAKLNDLAWLTDEQKDKLATKRYQGWGRLSSKLLIGLQNSEHRNIMDLLWIGNENFMQIQADSDFAKLIKDANQNALQNNDSQDVINDLYTSPQNKKAIRQILLVVHDIQNAMHGQAPTKIHVEFAKGEERNPRRSVQRQRQVEAAYEKASNELVGANVREELKDAITNKRDFKDRLFLYFMQGGVDMYSGEPINIDNLSRYDIDHILPQAFVKDDSLNNRVLTDAEKNRRKSDAVPNELFGAKMRVTWERMKEQGLISKGKYRNLTMNPENINKYTENGFINRQLVETRQVIKLAVNILADEYKENTQIISVKADLSHQMREDFELLKNRDVNDYHHAFDAYLAAFMGNYLLKRYPKLRSYFVYGDFKKFTQKEIKLRRFNFIYDLKHEDQVIDKETGEILWNKNEDIAYIRHLFAYKKILISHEVSERRGALYNQTVYKASDDKASGQGSKKLIPIKSDKPTEIYGGYTGRTLAYMTIVKVTKGKKISYKVVGVPTAVLAKMAGVRQGSQEEQDKLYGVLKPQFTHQKENKKTGEITETVDKFDIIVPKVKYQQLVNDNGQLFMIGSDTLPYNAEQLVLSKESVQTINNPGIKDEGSDEESENKKLDNVYDEIVLCMNKYFPLYDNRGFRNSITNGKNKFLKLPIKNIYKNGKLINVGKREVINRILQGLHANASVTDLSNLGIKSPFGFLQKGAGLSLSGEAQLIHQSATGLFEHRVQLNKIK

SEQ ID NO: 265 - protein, 1374 aa, Pediococcus lolii DSM 19927
SGEKRYSEINNVEEEFYMGDRKYNLGLDIGTSSIGFAAVDENNQPIRVKGKTAIGVRLFEEGKTAADRRGFRTTRRRLSRRRWRINLLNGIFDAHLAEVDPTFLARLKESNRSNLDPKKSFQGSLLFPERKDYQFYKEYPTIYHLRKALMEKDRKFDIREIYLAVHHIIKYRGNFLNGTPMRSFKVENIELDTLFDRLNQLYEEIIPDNELAFDLEQVADVKEVLSSTTIYKMDKKKQLVKMMLLPASNKALQSENKKIVTQFVNAILNYKFKLDVLLQVETDADWSLKLNDEGADDKLEEFTGDLDENRLEIIDLLQRLHNWFSLNEITKDGNSLSAAMVEKYKDHRHHLELLKKVIEDHSDAKKAKALKETYTAYVGKTDDKTQNKDDFYKAVEKNLDDSPEAKEIKRLIQLDQFMPKQRTGQNGAIPHQLHQQELDQIIEKQSKYYPFLAEPNPNVKRRKDAPYKLDELIAFKIPYYVGPLVTPEEQAQNKENVFAWMKRKAAGPITPWNFDEKVDRMESANRFIRRMTTKDTYLFGEDVLPAESMIYEKFVVLNELNNLKINGRHLSLKDKQDIYNDLFKQQKTVSIKALQNYYVTKKKAATAPTVGGLADPKKFLSSLSTYIDFKNMFGERVNDPQFQEDLEQIVEWSTIFEDRGIFKAKLQALGWLSEKQIQQLVAKRYKGWGRLSKKLLTGLKNAEGYSILDEMWHSTENFMQIQTRPEFAALIQQANEKQFEGNDPDNVWENIENILGDAYTSPQNKKAIRQVVKVVQDIEKAVGNPPEKIAIEFTREAAANPQRTQSRLRTLEKLYESAEEVVDAGLTAELAEFKENKHVLSDKYYLYFTQLGRDVYTGDTISLDRLNDYDVDHILPQSFIKDDSLDNRVLTIRAVNNGKSDNVPAKMFGKKMGSFWRYLLDNGMISKRKYNNLITDPDNISKYAQKGFINRQLVETSQVIKLTANILNGIYDKDTEIIEVPAKMNSQMRKMFDLVKVREVNDYHHAFDAYLTIFIGNYLYKCYPKLRPYFVYDNFKKFGNKEDIGHKRFNFLGKIERDKKVVAPETGEILWSNVAPNETIKQIKKVYDYKFMLTSHETYTKHGALFNQTIYSAKASKTMIPIKNDRPTKLYGGYSGNEDAYMSIIRLSDKKKTYKVVGISMRDASKLKAYENNAHEEYLKKLKEVIEQQFLDSGKKTKADFEIVIPKVNYHQRMQDGTKQFRIGSSKYVHNTKQLVLSEKTLKAIRNNKQYNGDAEKDLINAFDEILTIVNDSFSIFDIRSFRKKLNESRDKFVSLPVEDTKEKSKVIKGKRETLKQILIALHANGTSQDIPQLGLKSFGKMVKTGGLTLSENTALIHQSPSGLFEHKIKLSDL

SEQ ID NO: 266 - protein, 1374 aa, Pediococcus parvulus DSM 20332 A; identical to SEQ ID NO: 265

SEQ ID NO: 267 - protein, 1375 aa, Pediococcus parvulus DSM 20332 B
MENKKYSIGLDIGTSSIGFAVVDENNRVMRVKGKNAIGVRLFSEGQPAADRRSFRTTRRRLSRRRWRLRLLREIFEPYINPVDEAFFMRLKESNLSPKDANKHYSGDILFNDQSDQKFYEKYPTIYHLRHALMTEHRKFDVREIYLAIHHIVKFRGHFLNAASASNFTVGKLNLEGKFDALNEIYQRVLTDDPFALRTDNLDHIKEILIDNKRSKADRQRTLTGDVYQSSEEKEIEKRNKAIATEILKAAVGNKAKLNVITNVEVDKEAAKDWSLTFDSETIDDELAKVDGQMTDDGREIIEILRSLYSGITLAAIVPENHTLSQSMVEKYNSHKAHLKLLKDLINNMTDTRKAKNLRAAYDGYIDGVKGKVLTRDDFYKQIQGNLDDSAEAQKIQDVMDQDEFMPKQRTKANGSIPHQLQQQELDQIVENQKEYYPWLAEENPNETRRGVAKYKLDELVTFRVPYYVGPMITAEDQEKQSGASFAWMKRKEPGNITPWNFDQKVDRMASANQFIKRMTTTDTYLLGEDVLPAQSLLYQRFEVLNELNKIRIDRKPISIELKQQIFNDLFKKFKNVTIKHLQEYLVATGGYDKRPRIDGLADEKRFNSGLSAYHDLHGILGAEVVDANDKQDDLEKIIEWSTIFEDKKIYRAKLDELTWLTDSQKEKLATKRYQGWGRLSKKLLSGLRNSDHRSILDILWITNENFMQIQADPDFAELVKNANQGMLGKNNSQDVINDLYTSPQNKKAIRQILLVVHDIQNAMHGQAPAKIHVEFARGEERNPRRSIQRQHQIEAAYDKVTSDLLVDAGVRQELKDAINDKRDFKDRLFLYFMQGGRDIYNGEPINIDRLSSYDIDHILPQAFVKDDSLNNRVLTDAEGNRRKSDAVPSELFGAKMRSTWELMREQGLISKAKYRNLTMNPENINAHTENGFINRQLVETRQVIKLAVNILADEYTEDTQIVSVKADLSHQMREDFELLKNRDVNDYHHAFDAYLAAFIGNYLLERYPKLQSYFVYGDFKKFSQKDTKMRRFNFIYDLKHSDQIADKNGKKIWHKTNDLDYIRHLFAYKKILISHEVSERRGALYNQTVYKASDDKASGQGSKKLIPIKANKPTEIYGGYTGKTLAYMAIVKVIKGKKIAYKVVGVPTSALVQLAGIEHGSQEELNRLYDVLKPQFTQLKKNNKTGEISETVSKFEIVIPRVKYQQLVEDDDKLFMIGSDTYPYNAQQLVLSEGALKVINNVYRKGENSDKQESYKLDDVYDEIIIAMKKYFPLYDNRGFREKVAEGKSTFENLPISNEFKNGKLTKIGKKEVINRMLQGLHANATMTDLKILGIKSPFGFMQQPTGIALSENAQLIYQSPTDLFERRVQLNKIK

SEQ ID NO: 268 - protein, 1382 aa, Pediococcus stilesii DSM 18001
SDIVRIDNGLEELKVNNRIYNIGLDIGTSSVGFAVTDAQDKLVRVKGKTAIGVRLFEEGHTAAERRGFRTTRRRLSRRKWRINLLNQIFEPYISEIDPTFFARLKNSSLAGKDKKFEGSLLFPDRTDYQFYKDNPTMYHLRKHLMEKDRQFDLREIYLAMHHIIKYRGNFLNTTPMNHFKNEEIDFSALFSRLNELYQEIDDENIFELNIENVDEIKKILLNHDLFKMEKQKQVAKLLNVDTDDKQLKKENTALASNFSKAILGYKFNLALVTKIPDQDKKEWTISLGDEDFDDRLDNVPVALTESQLEVVEVLHSIFNSISLNEIVENGETLSSAMVRKYNDHKHDLKLLKNVMTTLEDRKKAKKIQGIYNVFVGKDTDLISDKDKNKYKDKDEFYKEIQKNLDNSSDAEEIIKRIKQDQFLPKQRTSKNGVIPHQLHQRELDLIIENQAKYYPFLKEANPNKKRLKQAKYKLDELIAFKIPYYIGPTSGAENSDFSWLKRKKDGQITPWNFDEKVDRIESANRFIRRMTTKDTYLLAEDVLPLESLIYEKYSVLNELNNVRINRQKLSVNDKQDIYNELFKNSKTVTLKQLQKYFEVTKKLKTVVVEGLADPKKFLSNLGTYHDFKLIFGDIVDDPEYQTDLENIIEWSTIFEDRGIFNSKLNEITWLTDEQRKKVLSKRYQGWGRFSKKLLVGLKNSQGNSILDELWNTNLNFMQLQSQDDFAELIHAENAKQFKANDPDNPWNGIDAILNDAYTSPQNKKAIRQVVKVVQDIEKAMGNKPQKIAIEFTRSADKNPRRTDSRIKRLSDIYKEAAEKVVGESLKLELNEYLTSKKKMTDKMYLYFTQLGTDIYTGKKIDIDQLNNYDIDHVLPQSFLKDDSLDNRVLTNRSDNSEKSDTVPLHKFGAKMGNFWRQLADEGLITKRKYKNLTTDPATIDKYTIQGFIRRQLVETSQVIKLTANILGGLYPEETEILEIPAKLNHQFRDMFDLVKVREVNDYHHAFDAYITVFVGNFLYRRYPKLRSYFVYGDFKKLNKTDDDIRKFNFLNLFNKDKVEDNETDEILWSKAESIRDIKNIYNYKFMLVSREVYTRHGAMFNQTIYPASKNDSKKLIPIKKGKDTAIYGGYSGNTDAYMAIVAVEDKKGEKFKVVGVPTRAVSRLEQLAADDHDQYLTALHDVLKPNFTKIKTNRKTKAKEEVTTPFRILVGKVGYRQLIQDGQVKMMLGSSAYKYNAKQLVLSEKSLKVIKNNKKYNPDDENQDLIDVYDEILGVVNRAFNLYDTNGFRKKLNDNRVKFVELPINNIFDGTKLVQMGKRAVLTQILNGLHANAALGDLKALGISTPFGKMQSKSGIPLSMDASLVYQSPTGLFERKLNLSDL

SEQ ID NO: 269 - protein, 1370 aa, Steptococcus agalactiae GB00300
MNKPYSIGLDIGTNSVGWSIITDDYKVPAKKIRVLGNTDKEYIKKNLIGALLFDGGNTAADRRLKRTARRRYTRRRNRILYLQEIFAEEMSKVDDSFFHRLEDSFLVEEDKRGSKYPIFATLQEEKYYHEKFPTIYHLRKELADKKEKADLRLVYLALAHIIKFRGHFLIEDDRFDVRNTDIQKQYQAFLEIFDTTFENNDLLSQDVDVEAILTDKISKSAKKDRILAQYPNQKSTGIFAEFLKLIVGNQADFKKHFNLEDKTPLQFAKDSYDEDLENLLGQIGDEFADLFSAAKKLYDSVLLSGILTVTDLSTKAPLSASMIQRYDEHREDLKQLKQFVKASLPEKYQEIVADSSKDGYAGYIEGKTNQEAFYKYLSKLLTKQEGSEYFLEKIKNEDFLRKQRTFDNGSIPHQVHLTELRAIIRRQSEYYPFLKENLDRIEKILTFRIPYYVGPLAREKSDFAWMTRKTDDSIRPWNFEDLVDKEKSAEAFIHRMTNNDLYLPEEKVLPKHSLIYEKFTVYNELTKVRFLAEGFKDFQFLNRKQKETIFNSLFKEKRKVTEKDIISFLNKVDGYEGIAIKGIEKQFNASLSTYHDLKKILGKDFLDNTDNELILEDIVQTLTLFEDREMIKKRLDIYKDFFTESQLKKLYRRHYTGWGRLSAKLINGIRNKENQKTILDYLIDDGSANRNFMQLIKDAGLSFKPIIDKARTGSHSDNLKEVIGELAGSPAIKKGILQSLKIVDELVKVMGYEPEQIVVEMARENQTTAKGLSRSRQRLTTLRESLANLKSNILEEKKPKYVKDQVENHHLSDDRLFLYYLQNGKDMYTDDELDIDNLSQYDIDHIIPQAFIKDDSIDNRVLVSSAKNRGKSDDVPSLEIVKDCKVFWKKLLDAKLMSQRKYDNLTKAERGGLTSDDKARFIQRQLVETRQITKHVARILDERFNNELDSKGRRIRKVKIVTLKSNLVSNFRKEFVFYKIREVNNYHHAHDAYLNAVVAKAILTKYPQLEPEFVYGDYPKYNSYKTRKSATEKLFFYSNIMNFFKTKVTLADGTVVVKDDIEVNNDTGEIVWDKKKHFATVRKVLSYPQVNIVKKTEIQTGGFSKESILAHGNSDKLIPRKTKDIYLDPKKYGGFDSPIVAYSVLVVADIKKGKAQKLKTVTELLGITIMERSRFEKNPSAFLESKGYLNIRTDKLIILPKYSLFELENGRRRLLASAGELQKGNELALPTQFMKFLYLASRYNESKGKPEEIEKKQEFVNQHVSYFDDIFQIINDFSKRVILADANLEKINRLYQDNKENIPVDELANNIINLFTFTSLGAPAAFKFFDKIVDRKRYTSTKEVLNSTLIHQSITGLYETRIDLGKLGED

SEQ ID NO: 270 - protein, 1370 aa, Steptococcus gallolyticus ATCC BAA-2069
MTKKNYSIGLDIGTNSVGWAVITDDYKVPAKKMKVLGNTDKKYIKKNLLGALLFDSGETAEATRLKRTARRRYTRRKNRLRYLQEIFAEEMTKVDESFFYRLDESFLTTDEKDFERHPIFGNKAEEDAYHQKFPTIYHLRNYLADSSEKADLRLVYLALAHMIKYRGHFLIEGKLNAENTDVQKLFTDFVGVYDRTFDDSHLSEITVDVASTLTEKISKSRRLENLIKYYPTEKKNTLFGNLIALALGLQPNFKMNFKLSEDAKLQFSKDTYEEDLEELLGKIGDDYADLFTSAKNLYDAILLSGILTVDDNSTKAPLSASMIKRYVEHHEDLEKLKEFIKANKSELYHDIFKDKNKNGYAGYIENGVKQDEFYKYLKNTLSKIDGSDYFLDKIEREDFLRKQRTFDNGSIPHQIHLQEMHAILRRQGDYYPFLKEKQDRIEKILTFRIPYYVGPLVRKDSRFAWAEYRSDEKITPWNFDKVIDKEKSAEKFITRMTLNDLYLPEEKVLPKHSHVYETYAVYNELTKIKYVNEQGKESFFDSNMKQEIFDHVFKENRKVTKEKLLNYLNKEFPEYRIKDLIGLDKENKSFNASLGTYHDLKKILDKAFLDDKVNEEVIEDIIKTLTLFEDKDMIHERLQKYSDIFTANQLKKLERRHYTGWGRLSYKLINGIRNKENNKTILDYLIDDGSANRNFMQLINDDTLPFKQIIQKSQVVGDVDDIEAVVHDLPGSPAIKKGILQSVKIVDELVKVMGDNPDNIVIEMARENQTTNRGRSQSQQRLKKLQSSLKELGSNILNEEKPSYIEDKVENSHLQNDQLFLYYIQNGKDMYTGDELDIDHLSDYDIDHIIPQAFIKDDSIDNRVLTSSAKNRGKSDDVPSLDIVRARKAEWVRLYKSGLISKRKFDNLTKAERGGLTEADKAGFIKRQLVETRQITKHVAQILDARFNTEHDENDKVIRDVKVITLKSNLVSQFRKDFEFYKVREINDYHHAHDAYLNAVVGTALLKKYPKLASEFVYGEYKKYDIRKFITNSSDKATAKYFFYSNLMNFFKTKVKYADGTVFERPIIETNADGEIAWNKQIDFEKVRKVLSYPQVNIVKKVETQTGGFSKESILPKGDSDKLIPRKTKKVYWDTKKYGGFDSPTVAYSVFVVADVEKGKAKKLKTVKELVGISIMERSFFEENPVEFLENKGYHNIREDKLIKLPKYSLFEFEGGRRRLLASASELQKGNEMVLPGYLVELLYHAHRADNFNSTEYLNYVSEHKKEFEKVLSCVEDFANLYVDVEKNLSKIRAVADSMDNFSIEEISNSFINLLTLTALGAPADFNFLGEKIPRKRYTSTKECLTATLIHQSITGLYETRIDLSKLGEE

SEQ ID NO: 271 - protein, 1126 aa, Steptococcus henryi DSM 19005
MTNGLVLGLDIGIASVGVGIIEAETGKVIHASSRIFPAANADNNAERRGFRGGRRLTRRKKHRVKRVRDLFDDYNIATDFSNLNLNPYELRVKGLTEELTNEELFAALRNISKRRGISYLDDAEDDANSGKTDYAKSVLANKELLKTQTPGQIQLDRLNKYGQLRGDFDVVDENGEIHRVINVFSTSDYRKEAEKILQTQSQFNNAINQEFINDYIDILVSKRKYYHGPGNEKSRTDYGRYRTDGRTLENIFDILVGKCTFYPEEYRAAKASYTAQEFNFLNDLNNLTLPTETKKLSIEEKLYLVDYAKNTPVLGPDKLLKEIAKLVDCKKEDIKGFRIDNKEKPDMHTFEVYRTMSKLDKVDIQTLSRETFDELARILTLNTEREGIEEAILKDLPNQFTNEQIEELIKFRKDKSQIFGKGWHNFSVKLMLELIPELYDTSEEQMTILTRLGKTSANKKEVKRTKYINENDVTEEIYNPVVVKSVRQAIKIINASVKEWGEFDNIVIEMPRETNADDERKFIKKMQDANAKEKKDSEERAATLYNGKTELPSNIFHGHNQLATKIRLWYQQGERCIYTGQKIDINDLIHNHNMYEIDHVLPLSLSFDDSLANKVLVLATANQEKGQKTPFQSIPQMKSAWSYREFKSYVLGCKGLSKKKREYLLTEEDINKIEVKQKFIERNLVDTRYASRVVLNTLQDSLKAMNKKTRVSVVRGQFTSQLRRQWKIDKSRETYHHHAIDALIIAASSQLRLWKKQGDTMFEDYKNGQKVDLETGELLSDNEYKELVFQSPYQGFVNTISSKAFEDEILFSYQVDSKVNRKISDATIYATRQAKLTKDKKEETYVLGKIKDIYSQAGYDAFRKRYEKDKSAFLMYQKDPMTWEKVIEVILNDYCEFDDKGKETGNPFEKYRNENGYIRKYSRKGKGTEIKSLKYYDSKLGNHIDITPENSKNSVVLQSINPWRADLYFNPKTLKYELMGLKYSDLSFEKGTGNYSISQDKYDEIKSREGISPKSEFKFTLYKNDLILIKDTINNKTLTARFNSKNDTSKHYVELKPDSKAKYDSEEVLIPVFGKVAKSGRFIKGINKTGISIYKIKTDILGRKHFIKEEGDQPKLEFMKSSKNNK

SEQ ID NO: 272 - protein, 1128 aa, Steptococcus mutans NLML5
MANSKILGLDIGIASVGVGIIDKETGKIIHVNSRIFPAATADSNVERRGFRQGRRLVRRKKHRKVRLADLFLDSNLLTDFSKVSLNLNPYQLRVKGLNEELSNEELFIALKSIVSRRGISYLDDASEDSGANSSEYGKAVEENRKLLEDRTPGQIQLERFEKYGKVRGDFTVVENGENHRLINVFSTSAYKKEAERILRRQQEFNIRIADEFIEAYLTILTGKRKYYHGPGNEKSRTDYGRFRTDGTTLDNIFGILIGKCTFYPDEYRAAKASYTAQEFNLLNDLNNLTVPTETKKLSEEQKRQIIEHAKTVKTLGAPTLLKYIAKLVGCSADDIKGYRIDKSDKPEIHTFEAYRKMRTMELIKVADLSRESLDALAHILTLNTEREGIEEAIRDRFTNKEFNQEQINELVLFRKNNSSLFGKGWHNFSLKLMKELIPELYETSEEQMTILTRLGKQRVKKSSNRTNYIDEKELTEEIYNPVVAKSVRQAIKIINLATKKYGVFDNIVIEMARESNEDDEKKAIQNAQKANEDEKEAALLKAAHQFNGKEELPDSIFHGHKELLTKIRLWHQQGEKCLYTGKTIFINDLIHNPYKYEIDHILPLSLSFDDSLANKVLVLSTANQEKGQRTPFQSLDSMDGAWTYREFKAYVKGLKTLSNKKKDYLLNEEDINKNEVKQKFIERNLVDTRYSSRVVLNTLQDFYKKREFDTKISVVRGQFTSQIRRKWRIEKTRETYHHHAVDALIIAASSQLNLWKKQNNPLISYKEDQFVDPETGEILSLSDDEYKELVFKAPYDHFVDTLKSKKFEDSILFSYQVDSKYNRKISDATIYGTRKARLGKDSQEETYVLGKIKDIYSQKGYEDFIKKYKKDKTQFLMYHKDPQTFEKVIEEILKTYSDKELNEKGKEVPCNPFEKYRQENGPVRKYSKKGNGPEIKSIKYYDNKLGNHIDITPNNSHHQVVLQSLKPWRTDVYFNPKSGKYELMGLKYSDLRFEKVSGDYGISVKKYNEIKSKEGVDENSEFKFTLYKNDLILIKDTESGEQELFRFLSRTMPNQKHYVELKPYDKSKFEGHQKLMDIFGEVAKGGQCLKGLNKSNISIYKVKTDVLGNKYFIKKEGDQPQLNFKKKI

SEQ ID NO: 273 - protein, 1373 aa, Steptococcus oralis SK304
MENKNYSIGLDIGTNSVGWAVITDDYKVPSKKMKVLGNTDKRFIKKNLIGALLFDEGTTAEARRLKRTARRRYTRRKNRLRYLQEIFAEEMSKVDSSFFHRLDDSFLIPEDKKGSKYPIFATLIEEKEYHKQFPTIYHLRKQLADSKEKTDLRLIYLALAHMIKYRGHFLYEDTFDIKNNDIQKIFNEFISIYNNTFEGNSLSGQNVQVEAIFTDKISKSAKRERVLKLFPDEKSTGLFSEFLKLIVGNQADFKKHFDLEEKAPLQFSRDTYDEDLENLLGQIGDDFADLFVAAKKLYDAILLSGILTVTDPSTKAPLSASMIERYENHQKDLATLKQFIKTNLPEKYDEVFSDQSKDGYAGYIDGKTTQESFYKYIKNLLSKFEGADYFLEKIEREDFLRKQRTFDNGSIPHQIHLQEMNAILRRQGEHYPFLKENKEKIEKILTFRIPYYVGPLARGNRDFAWLTRNSDQAIRPWNFEEIVDKASSAESFINKMTNYDLYLPEEKVLPKHSLLYETFAVYNELTKVKFIAEGLRDYQFLDSRQKKDIFYTLFKAEDKRKVTEKDIIQYLHTVDGYDGIELKGIEKQFNASLSTYHDLLKIIKDKEFMDDPNNEEILENIVHTLTIFEDREMIKQRLAQYDSLFDEKVIKALTRRHYTGWGKLSSKLINGIRDKQTGKTILDYLMDDGYNNRNFMQLINDDELSFKEIIKKAQVVGKTDDVKQVVQELPGSPAIKKGILQSIKLVDELVKVMGHEPESIVIEMARENQTTARGKKNSQQRYKRIEDSLKILASGLNAKILKEHPTDNIQLQNDRLFLYYLQNGRDMYTGKPLDINQLSSYDIDHIVPQAFIKDDSLDNRVLTSLKDNRGKSDNVPSLEVVEKMKTFWQQLLDSKLISYRKFNNLTKAERGGLDERDKVGFIKRQLVETRQITKHVAQILDARYNTEVNEKDKKNRTVKIITLKSNLVSNFRKEFRLYKIREINDYHHAHDAYLNAVVAKAILKKYPKLEPEFVYGDYQKYDLKRYISRSKDPKEIEKATEKYFFYSNLLNFFKEEVHYADGTIVKRENIEYSKDTGEIAWNKEKDFATIKKVLSLPQVNIVKKREVQTGGFSKESILPKGNSDKLIPRKTKDILWDTTKYGGFDSPVIAYSILLIADIEKGKAKRLKTVKTLVGITIMEKATFEKSPIAFLENKGYHNVRKENILCLPKYSLFELKNGRRRMLASAKELQKGNEIVLPVHLTTLLYHAKNIHRLDEPEHLEYIQKHRNEFKGLLNLVSEFSQKYVLADANLEKIKNLYADNEQADIEILANSFINLLTFTALGAPAAFKFFGKDVDRKRYTTVSEILNATLIHQSITGLYETRIDLSKLGED

SEQ ID NO: 274 - protein, 1125 aa, Streptococcus anginosus 1_2_62CV
MNGLVLGLDIGIASVGVGILNKETGEIIHANSRIFPAATADSNVERRGFRQGRRLGRRKKHRSARLNNLFEEFGFITDFSAIPLNLNPYALRVKGLSEELTNEELFIALKNIIKRRGISYLDDASEDGETASNEYGKAVEENRKLLADKTPGQIQLERFEKYGQVRGDFTVVENGENHRLINVFSTSAYKKEAERILRRQQEFNVRISDEFIEAYLTILTGKRKYYHGPGNEKSRTDYGRFRTDGTTLDNIFGILIGKCTFYPDEYRAAKASYTAQEFNLLNDLNNLTVPTETKKLSPEQKRQIVEYARTAKTLGTPTLLKYIAKLVDGSIDDIKGYRIDKSDKPEMHTFDAYRKMRTLDLVNIDALSRETLDDLAHILTLNTESEGILEALNSKMPSTFTKEQIDELIQFRKKNSAVFGKGWHNFSLKLMNELISELYETSEEQMTILTRLGKQRSREISKRTKYIDEKELTEEIYNPVVAKSVRQAIKIINEATKRYGIFDNIVIEMARENNEEDAKKDYIKRQKANQDEKNASMEKAAFQYNGKKELPDSIFHGHKELATKIRLWHQQGERCLYTGKNISIRDLIHNPHQYEIDHILPLSLSFDDGLANKVLVLATANQEKGQRTPFQAIDSMDDAWSYREFKQYVRNSKSLSNKKKDYLLTEEDISKIEVKQKFIERNLVDTRYSSRVVLNTLQEFYKTNDFDTKISVVRGQFTSQLRRKWKIEKSRDTYHHHAVDALIIAASSQLRLWKKQNNPLISYKEGQFVDPETGEILSLTDDEYKELVFRPPYDYFVDTLKSKSFEDSILFSYQVDSKYNRKISDATIYGTRKAQLGKDKQEETYVLGKIKDIYSQKGYEDFIKRYNKDETQFLIYHKDPQTFEKVIEEILKTYPDKELNEKGKEIPCNPFEKYRQENGPIRKYSKKGKGPEIKSLKYYDNKLGNHIDITPVNSQNQVVLQSLKPWRTDVYFNPRTSKYELMGLKYSDLRFEKGSGSYGISPEKYNKVKAKEGVNEDSEFKFTLYKNDLILIKDTETGEQQLFRYGSRNDTSKHYVELKPYEKAKFEGNQQLMNLLGTVAKGGQCLKGINKPNLSIYKVKTDVLGNKYFIKKEGDQPQLNFKKKF

SEQ ID NO: 275 - protein, 1396 aa, Streptococcus anginosus DSM 20563
MTKPYSIGLDIGTNSVGWAVITDDYKVPAKKMKVLGNTNRDYIKKNLLGALLFDGGETAEGRRLKRTARRRYTRRKNRLRYLQEIFAEEMMQVDESFFQRLDDSFLVEEDKQGSKYPIFGTLKEEKEYHKKFKTIYHLREELANSKEKADLRLVYLALAHMIKFRGHFLYEGDLKAENTDVQALFKDFVEEYDKTIEESHLSEITVDALSILTEKVSKSSRLENLIAHYPTEKKNTLFGNLIALSLGLQANFKTNFQLSEDAKLQFSKDTYEEDLEGLLGEVGDEYADLFVSAKNLYDAILLSGILTVDDNSTKAPLSASMVKRYKEHKEELAAFKRFIKEKLPKKYEEIFKDDTKNGYAGYVGADKKLRKRSGKLATEEEFYKYVKGILNKVEGADYFLDKIDREDFLRKQRTFDNGSIPHQIHLQEMHAILRRQGEHYPFLKENQDKIEKILTFRIPYYVGPLARKGSRFAWAEYKADEKITPWNFDDILDKEKSAEKFITRMTLNDLYLPEEKVLPKHSPLYETFTVYNELTKVKYVNEQGEAKFFDTNMKQEIFDHVFKENRKVTKDKLLNYLNKEFEEFRIVNLTGLDKENKAFNASLGTYHDLRKILDKSFLDDKVNEKIIEDIIQTLTLFEDREMIRQRLQKYSDIFTTQQLKELERRHYTGWGRLSYKLINGIRNKENKKTILDYLIDDGYANRNFMQLINDDALSFKEEIARAQIIGDVDDIANVVHDLPGSPAIKKGILQSVKIVDELVKVMGHNPTNIIIEMARENQTTDKGRRNSQQRLKLLQDSLKNLDNPVNIKNVENQQLQNDRLFLYYIQNGKDMYTGETLDINNLSQYDIDHIIPQAFIKDNSLDNRVLTRSDKNRGKSDDVPSIEVVHEMKSFWSKLLSVKLITQRKFDNLTKAERGGLTENDKAGFIKRQLVETRQITKHVAQVLDARFNAKHDENKKVIRDVKIITLKSNLVSQFRKDFKFYKVREINDYHHAHDAYLNAVIGTALLKKYPKLASEFVYGEFKKYDVRKFIAKSDKEIGKATAKYFFYSNLMNFFKKEVKFADGTVVERPDIETSEDGEIAWNKQTDFKIVRKVLSYPQVNIVKKTEVQTHGLDRGKPRGLFNANPSPKPKPDSSENLVGIKRNLDPKKYGGYAGISNSYAVLVKAIIEKGVKKKETMVLEFQGISILDRITFEKDKRAFLLGKGYKDIKKIIELPKYSLFELKDGSRRMLASILSTNNKRGEIHKGNELFVPQKFTTLLYHAKRINNPINKDHIEYVKKHRDDFKELLNYVLEFNEKYVGATKNGERLKEAVADFDSKSNEEICTSFLGAVNSKNAGLFELTSLGSASDFEFLGVKIPRYRDYTPSSLLKDSILIHQSITGLYETRIDLSKLGED

SEQ ID NO: 276 - protein, 1155 aa, Streptococcus dysagalactiae subsp equisimilis
MDKKYSIGLDIGTNSVGWAVITDDYKVPSKKFKVLGNTDRHSIKKNLIGALLFDSGETAEATRLKRSARRRYTRRKNRIRYLQEIFSSEMSKVDDSFFHRLEESFLVEEDKKHERHPIFGNIVDEVAYHEKYPTIYHLRKKLADSTDKADLRLIYLALAHMIKFRGHFLIEGDLNPDNSDMDKLFIQLVQTYNQLFEENPINASRVDAKAILSARLSKSRRLENLIAQLPGEKRNGLFGNLIALSLGLTPNFKSNFDLAEDAKLQLSKDTYDDDLDNLLAQIGDQYADLFLAAKNLSDAILLSDILRVNSEITKAPLSASMIKRYDEHHQDLTLLKALVRQQLPEKYKEIFFDQSKNGYAGYIDGGASQEEFYKFIKPILEKMDGTEELLAKLNREDLLRKQRTFDNGSIPHQIHLGELHAILRRQEDFYPFLKDNREKIEKILTFRIPYYVGPLARGNSRFAWMTRKSEETITPWNFEEVVDKGASAQSFIERMTNFDKNLPNEKVLPKHSLLYEYFTVYNELTKVKYVTEGMRKPEFLSGKQKEAIVDLLFKTNRKVTVKQLKEDYFKKIECFDSVEISGVEDRFNASLGTYHDLLKIIKDKDFLDNEENEDILEDIVLTLTLFEDKEMIEERLKTYAHLFDDKVMKQLKRRHYTGWGRLSRKLINGIRDKQSGKTILDFLKSDGFANRNFIQLIHDDSLTFKEAIQKAQVSGQGHSLHEQIANLAGSPAIKKGILQSVKVVDELVKVMGHKPENIVIEMARENQTTQKGQKNSRERMKRIEEGIKELGSQILKEHPVENTQLQNEKLYLYYLQNRRDMYVDQELDINRLSDYDVDHIVPQSFIKDDSIDNKVLTRSDKNRGKSDDVPSEEVVKKMKNYWRQLLNAKLITQRKFDNLTKAERGGLSELDKAGFIKRQLVETRQITKHVAQILDSRMNTKYDENDKLIREVKVITLKSKLVSDFRKDFQFYKVREINNYHHAHDAYLNAVVGTALIKKYPKLESEFVYGDYKVYDVRKMIAKSEQEIGKATAKRFFYSNIMNFFKTEITLANGEIRKRPLIETNEETGEIVWDKGRDFATVRKVLSMPQVNIVKKTEVQTGALTNESIYARGSFDKLISRKHRFESSKYGGFGSPTVTYSVLVVAKYQSYKMEK

SEQ ID NO: 277 - protein, 1348 aa, Streptococcus equi subsp zooepidemicus
MKKPYTIALDIGTNSVGWVVVTDDYRVPTKKMKVLGNTERKTIKKNLIGALLFDSGDTAEGTRLKRTARRRYTRRKNRLRYLKEIFTEEMAKVDDGFFQRLEDSFYVLEDKEGNKHPIFANLADEVAYHKKYPTIYHLRKELVDNPQKADLRLIYLAVAHIIKFRGHFLIEGTLSSKNNNLQKSFDHLVDTYNLLFEEQRLLTEGINAKELLSAALSKSKRLENLISLIPGQKKTGIFGNIIALSLGLTPNFKANFGLSKDVKLQLAKDTYADDLDSLLAQIGDQYADLFLAAKNLSDAILLSDILTESDEITRAPLSASMVKRYREHHKDLVTLKTLIKDQLPEKYQEIFLDKTKNGYAGYIEGQVSQEEFYKYLKPILARLDGSEPLLLKIDREDFLRKQRTFDNGSIPHQIHLEELHAILRRQEVFYPFLKDNRKKIESLLTFRIPYYVGPLARGHSRFAWVKRKFDGAIRPWNFEEIVDEEASAQIFIEKMTKNDLYLPNEKVLPKHSLLYETFTVYNELTKVKYATEGMTRPQFLSADQKQAIVDLLFKTNRKVTVKQLKENYFKKIECWDSVEITGVEDSFNASLGTYHDLLKIIQDKDFLDNPDNQKIIEDIILTLTLFEDKKMISKRLDQYAHLFDKVVLNKLERHHYTGWGRLSGKLINGIRDKQSGKTILDFLKADGFANRNFMQLIHDSELSFIDEIAKAQVIGKTEYSKDLVGNLASSPAIKKGISQTIKIVDELVKIMGYLPQQIVIEMARENQTTAQGIKNARQRMRKLEETAKKLGSNILKEHPVDNSQLQNDKRYLYYLQNGKDMYTGDDLDIDYLSSYDIDHIIPQSFIKNNSIDNKVLTSQGANRGKLDNVPSEAIVRKMKGYWQSLLRAGAISKQKFDNLTKAERGGLTQVDKAGFIQRQLVETRQITKHVAQILDSRFNTEFDDHNKRIRKVHIITLKSKLVSDFRKEFGLYKIRDINHYHHAHDAYLNAVVAKAILGKYPQLAPEFVYGDYPKYNSFKERQKATQKTLFYSNILKFFKDQESLHVNSDGEEIWNANKHLPIIKNVLSIPQVNIVKKTEVQTGGFYKESILSKGNSDKLIPRKNNWDTRKYGGFDSPTVAYSVLVIAKMEKGKAKVLKPVKEMVGITIMERIAFEENPVVFLEAKGYREIQEHLIIKLPKYSLFELENGRRRLLASASELQKGNELFLPVDYMTFLYLAAHYHELTGSSEDVLRKKYFVERHLHYFDDIIQMINDFAERHILASSNLEKINHTYHNNSDLPINERAENIINVFTFVALGAPAAFKFFDATIDRKRYTSTKEVLNATLIHQSVTGLYETRIDLSQLGEN

SEQ ID NO: 278 - protein, 1136 aa, Streptococcus gordonii Challis substr CH1
MNGLVLGLDIGIASVGVGILEKDTGKIIHASSRLFPAATADNNVERRSNRQGRRLNRRKKHRSVRLQDLFEGYGLLTDFSKVSMNLNPYQLRVQGMENQLTNEELFVALKNIVKRRGISYLDDASEDGGTVSSDYGKAVEENRKLLAEKTPGQIQLERFEKYGQLRGDFTVEENGEKHRLINVFSTSAYRKEAERILRKQQEFNSKITDEFIEDYLIILTGKRKYYHGPGNEKSRTDYGRFRTDGTTLDNIFGILIGKCTFYTEEYRASKASYTAQEFNLLNDLNNLTVPTETKKLSEEQKKLIIEYAKSAKTLGASTLLKYIAKMIDASVDQIRGYRVDVNNKPEMHTFEVYRKMQSLETIKVEELPRKVLDELAHILTLNTEREGIEEAINSKLKDIFNRDQVLELVQFRKNNSSLFSKGWHNFSIKLMMELIPELYETSEEQMTILTRLGKQRSKETSKRTKYIDEKELTEEIYNPVVAKSVRQAIKIINEATKKYGIFDNIVIEMARENNEEDAKKDYIKRQKANQDEKNAAMEKAAFQYNGKKELPDNIFHGHKELTTKIRLWHQQGEKCLYTGKNIPISDLIHNQYKYEIDHILPLSLSFDDSLSNKVLVLATANQEKGQRTPFQALDSMDDAWSYREFKSYVKDSKLLSNKKKDYLLTEEDISKIEVKQKFIERNLVDTRYSSRVVLNALQDFYKSHQLDTTISVVRGQFTSQLRRKWGIEKSRETYHHHAVDALIIAASSQLRLWKKHSNPLIAYKEGQFVDSETGEIVSLSDEEYKELVFKAPYDHFVDTLRSKKFEDSILFSYQVDSKYNRKISDATIYATRKAKLDKEKKEYTYTLGKIKDIYALGTKTPSKTGFYKFLDLYKTDKSQFLMYQKDRKTWDEVIEKIIEQYRPFKEYDKNGKEVDFNPFEKYRIGNGPIRKYSKKGNGPEIKSLKYYDILLGKHKNITPDGSRNTVALLSLNPWRTDVYYNSETKKYEFLGLKYADLCFEEGGAYGISEVKYKKIREKEGIGKNSEFKFTLYKNDLILIKDTETNCQQFFRFWSRTGKDNPKSFEKHKIELKPYEKAKFEKGEELKVLGKVPPSSNQFQKNMQIENLSIYKVKTDILGNKHFIKKEGDEPKLKFKK

SEQ ID NO: 279 - protein, 1129 aa, Streptococcus infantarius subsp infantarius
MSNGKILGLDIGVASVGVGIIDSKTGNVIHANSRLFSAANAENNAERRGFRGARRLTRRKKHRVKRVRDLFEKYDISTDFRNLNLNPYELRVKGLTEQLTNEELFAALRTIAKRRGISYLDDAEDDSTGSSDYAKSIDENRRLLKTKTPGQIQLERLEKYGQLRGNFTVYDENGEAHRLINVFSTSDYKNEARKILETQSNYNKQITDEFIEDYIEILTQKRKYYHGPGNEKSRTDYGRFRTDGTTLENIFGILIGKCSFYPEEYRASKASYTAQEFNFLNDLNNLKVPTETGKLSTEQKEYLVDFAKKSKALGASKLLKEIAKIVDCSVDDIKGYRVDNKDKPDLHTFEPYRKLKFNLSSIDIDELSRETLDKLADILTLNTEREGIEDAIKRNLPSQFTEEQISEIVQIRKNQSSAFNKGWHSFSAKLMNELIPELYVTSEEQMTILTRLEKFKVNKKSSKNTKTIDEKEITDEIYNPVVAKSVRQTIKIINAAVKKYGDFDKIVIEMPRDKNAEDEKKFIDKKQKENKKEKDDSLKRAAFLYNGTDNLPDGVFHGNKELKTKIRLWYQQGERCLYSGKLISIHDLVHNSNKFEIDHILPLSLSFDDSLANKVLVYAWTNQEKGQKTPYQVIDSMDTAWSFREMKDYVLKQKGLGKKKCEYLLTTENIDKIEVKKKFIERNLVDTRYASRVVLNSLQTALKELGKDTKVSVVRGQFTSQLRRKWNIDKSRETYHHHAVDALIIAASSQLKLWQKQENPMFESYGENQVVNKETGEILSISDDKYKELVFQPPYQGFVNTISSKGFEDEILFSYQVDSKFNRKVSDATIYSTRKAKLGKDKKDETYVLGKIKDIYSQDGFDTFIKRYKKDKTQFLMYQKDPLTWENVIEVILRDYPSEKLSEDGKKTVKCNPFEEYRRENGLICKYSKKGNGTPIKSLKYYDKKLGNCIDITPEKSKNRVVLRQISPWRADIYFNLETLKYELMGLKYSDLSFEKGTGKYHISQEKYDAIREKEGIGKKSEFKFTLYRNDLILIKDTLNNCERMLRFGSKNDTSKHYVELKPLEKGTFDSEEEILPVLGKVAKSGQFIKGLNKPNISIYKVRTDVLGNKFFIKKEGDKPKLDFKNNNK

SEQ ID NO: 280 - protein, 1125 aa, Streptococcus intermedius B196
MNGLVLGLDIGIASVGVGILNKETGEIIHVNSRIFPAATADSNVERRGFRQGRRLGRRKKHRSARLNDLFEEFGFITDFSAVPLNLNPYALRVKGLSEELTNEELFIALKNIIKRRGISYLDDASEDGETASNEYGKAVEENRKLLADKTPGQIQLERFEKYGQVRGDFTVVENGENHRLINVFSTSAYKKEAERILRRQQEFNVRISDEFIEAYLTILTGKRKYYHGPGNEKSRTDYGRFRTDGTTLDNIFGILIGKCTFYPDEYRAAKASYTAQEFNLLNDLNNLTVPTETKKLRPEQKRQIVEYARTAKTLGTPTLLKYIAKLVDGSIDDIKGYRIDKSDKPEMHTFDAYRKMRTLELVDVDILSRETLDDLAYILTLNTESEGILEALNSKMPGTFTKEQIDELIQFRKKNSAVFGKGWHNFSLKLMNELIPELYETSEEQMTILTRLGKQRSREISKRTKYIDEKELTDEIYNPVVAKSVRQAIKIINLATKKYGIFDNIVIEMARESNEDDEKKAIQNVQKANEDEKKAAMEKAADLYNGKKELPDSIFHGHKELATKIRLWHQQGERCLYTGKNISIHDLIHNPHQYEIDHILPLSLSFDDGLANKVLVLATANQEKGQRTPFQALDSMDDAWSYIEFKQYVRNSKSLSNKKKDYLLTEEDISKIEVKQKFIERNLVDTRYSSRVVLNTLQEFYKTNDFDTKISVVRGQFTSQLRRKWKIEKSRDTYHHHAVDALIIAASSQLRLWKKQNNPLISYREGQLVDPETGEILSLTDDEYKELVLRPPYDYFVDTLKSKSFEDSILFSYQVDSKYNRKISDATIYGTRKAQLGKDKQEETYVLGKIKDIYSQKGYEDFIKRYKKDTTQFLMYHKDPQTFAKVIEEILKTYPDKELNEKGKEIPCNPFEKYRQENGPIRKYSKKGKGPEIKSLKYYDNKLGNHIDITPVNSQNQVVLQSLKPWRTDVYFNPQTSKYELMGLKYSDLRFEKGSGSYGISPEKYNKVKAKEGVDEDSEFKFTLYKNDLILIKDTETGEQQLFRYGSRNDTSKHYVELKPYEKAKFEGNQQLMNLLGTVAKGGQCLKGINKPNLSIYKVKTDVLGNKYFIKKEGDQPQLNFKKKI

SEQ ID NO: 281 - protein, 1373 aa, Streptococcus lutetiensis 033
MEKTYSIGLDIGTNSVGWSVITDDYKVPAKKMKVLGNTDKKYIKKNLLGALLFDSGETAEVTRLKRTARRRYTRRKNRLRYLQEIFAKEMAKVDESFFQRLEESFLTDDDKTFDSHPIFGNKAEEDAYHQEFPTIYHLRKHLADSSEKADLRLVYLALAHMIKFRGHFLIEGELNAENTDIQKLFNDFVETYDKIADESHLSEVDASSILTNKISKSRRLENLIKQYPTEKKNTLFGNLVALVLGLQPNFKTNFKLSEDAKLQFSKDTYDEDLEELLGKIGDDYADLFTAAKNLYDAILLSGILTVDDNSTKAPLSASMIKRYEEHHEDLEKLKKFIKVNNFDKYHEIFKDKSKNGYAGYIENGVKQDIFYKHLKSIISEKNGGQYFLDKIEREDFLRKQRTFDNGSIPHQIHLQEMRAILRRQGEYYPFLKENQAKIEKILTFRIPYYVGPLARKDSRFAWANYHSDEPITPWNFDEVVDKEKSAEKFITRMTLNDLYLPEEKVLPKHSHVYETFTVYNELTKIKYVNEQGESFFFDANMKQEIFDHVFKENRKVTKAKLLSYLNNEFEEFRINDLIGLDKDSKSFNASLGTYHDLKKILDKSFLDDKTNEQIIEDIVLTLTLFEDRDMIHERLQKYSDFFTSQQLKKLERRHYTGWGRLSYKLINGIRNKENNKTILDFLIDDGHANRNFMQLINDESLSFKTIIQEAQVVGDVDDIEAVVHDLPGSPAIKKGILQSVKIVDELVKVMGDNPDNIVIEMARENQTTNRERSQSQQRLKKLQNSLKELGSNILNEEKPSYIEDKVENSHLQNDQLFLYYIQNGKDMYTGDELDIDHLSDYDIDHIIPQAFIKDNSIDNRVLTSSAKNRGKSDDVPSLDIVRARKAEWVRLYKSGLISKRKFDNLTKAERGGLTEADKAGFIKRQLVETRQITKHVAQILDARFNTKRDENDKVIRDVKVITLKSNLVSQFRKEFKFYKVREINDYHHAHDAYLNAVVGTALLKKYPKLTPEFVYGEYKKYDVRKLIAKSSDDYSEMGKATAKYFFYSNLMNFFKTEVKYADGRVFERPDIETNADGEVVWNKQKDFDIVRKVLSYPQVNIVKKVEEQTVGQNGGLFDNNILAKPEKDDKKKLFPIKKSLSTTSYGGYARATIAYSILIVSEFGKNKELKLLGLPLLDKVKYEKNPIAYLNSIGIINVKSIFKLPKYCLFEFQEKNTNYRRYMVSNQELKRANQLFLTCKETELVYKYIKSDNDNTHLVGNEKTILSIWNKLVIFMERTKLIDKKLFASLKQLKDEVDLINILDMTAKSLDFTKISAGQKKITISDSLSLPIKRWQFSSDEKMLKQLKTATLIHQSVTGLYETRIDLSKLGEE

SEQ ID NO: 282 - protein, 1392 aa, Streptococcus mitis SK321
MNNNNYSIGLDIGTNSVGWAVITDDYKVPSKKMKVLGNTDKHFIKKNLIGALLFDEGATAEDRRFKRTARRRYTRRKNRLRYLQEIFSEEMSKVDSSFFHRLDDSFLVPEDKRGSKYPIFATLAEEKEYHKKFPTIYHLRKHLADSKEKTDLRLIYLALAHMIKYRGHFLYEESFDIKNNDIQKIFSEFISIYDNTFEGSSLSGQNAQVEAIFTDKISKSAKRERILKLFAYEKSTDLFSEFLKLIVGNQADFKKHFDLEEKAPLQFSKDTYDEDLENLLGQIGDDFADLFLVAKKLYDAILLSGILTVTDSSTKAPLSASMIERYENHQKDLAALKQFIQNNLQEKYDEVFSDQSKDGYARYINGKTTQEAFYKYIKNLLSKFEGSDYFLDKIEREDFLRKQRTFDNGSIPHQIHLQEMNAIIRRQGEHYPFLKEYKEKIETILTFRIPYYVGPLARGNRNFAWLTRNSDQAIRPWNFEEIVDQASSAEEFINKMTNYDLYLPEEKVLPKHSLLYETFAVYNELTKVKFISEGLRDYQFLDSGQKKQIVNQLFKEKRKVTEKDIIQYLHNVDGYDGIELKGIEKQFNASLSTYHDLLKIIKDKEFMDDPKNEEILENIVHTLTIFEDREMIKQRLAQYASIFDKKVIKALTRRHYTGWGKLSAKLINGICDKKTGKTILDYLIDDGYSNRNFMQLINDDGLSFKDIIQKAQVVGKTNDVKQVVQELPGSPAIKKGILQSIKLVDELVKVMGHAPESIVIEIARENQTTARGKKNSQQRYKRIEDALKNLAPGLDSNILKEHPTDNIQLQNDRLFLYYLQNGKDMYTGEALDINQLSSYDIDHIVPQAFIKDDSLDNRVLTSSKDNRGKSDNVPSLEVVQKRKAFWQQLLDSKLISEHKFNNLTKAERGGLDERDKVGFIRRQLVETRQITKHVAQILDARFNTEVNEKDKKNRTVKIITLKSNLVSNFRKEFKLYKVREINDYHHAHDAYLNAVVAKAILKKYPKLEPGFVYGDYQKYDIKRYISRSKDPKEVEKATEKYFFYSNLLNFFKEEVHYADGTIVKRENIEYSKDTGEIAWNKEKDFATIKKVLSLPQVNIVKKTEIQTHGLDRGKPRGLFNSNPSPKPSEDRKENLVPIKQGLDPRKYGGYAGISNSYAVLVKAIIEKGAKKQQKTVLEFQGISILDKINFEKNKENYLLEKGYIKILSTITLPKYSLFEFPDGTRRRLASILSTNNKRGEIHKGNELVIPEKYTTLLYHAKNINKTLEPEHLEYVEKHRNDFAKLLEYVLNFNDKYVGALKNGERIRQAFIDWETVDIEKLCFSFIGPRNSKNAGLFELTSQGSASDFEFLGVKIPRYRDYTPSSLLNATLIHQSITGLYETRIDLSKLGED

SEQ ID NO: 283 - protein, 1345 aa, Streptococcus mutans TA 159
MKKPYSIGLDIGTNSVGWAVVTDDYKVPAKKMKVLGNTDKSHIEKNLLGALLFDSGNTAEDRRLKRTARRRYTRRRNRILYLQEIFSEEMGKVDDSFFHRLEDSFLVTEDKRGERHPIFGNLEEEVKYHENFPTIYHLRQYLADNPEKVDLRLVYLALAHIIKFRGHFLIEGKFDTRNNDVQRLFQEFLAVYDNTFENSSLQEQNVQVEEILTDKISKSAKKDRVLKLFPNEKSNGRFAEFLKLIVGNQADFKKHFELEEKAPLQFSKDTYEEELEVLLAQIGDNYAELFLSAKKLYDSILLSGILTVTDVGTKAPLSASMIQRYNEHQMDLAQLKQFIRQKLSDKYNEVFSDVSKDGYAGYIDGKTNQEAFYKYLKGLLNKIEGSGYFLDKIEREDFLRKQRTFDNGSIPHQIHLQEMRAIIRRQAEFYPFLADNQDRIEKLLTFRIPYYVGPLARGKSDFAWLSRKSADKITPWNFDEIVDKESSAEAFINRMTNYDLYLPNQKVLPKHSLLYEKFTVYNELTKVKYKTEQGKTAFFDANMKQEIFDGVFKVYRKVTKDKLMDFLEKEFDEFRIVDLTGLDKENKVFNASYGTYHDLCKILDKDFLDNSKNEKILEDIVLTLTLFEDREMIRKRLENYSDLLTKEQVKKLERRHYTGWGRLSAELIHGIRNKESRKTILDYLIDDGNSNRNFMQLINDDALSFKEEIAKAQVIGETDNLNQVVSDIAGSPAIKKGILQSLKIVDELVKIMGHQPENIVVEMARENQFTNQGRRNSQQRLKGLTDSIKEFGSQILKEHPVENSQLQNDRLFLYYLQNGRDMYTGEELDIDYLSQYDIDHIIPQAFIKDNSIDNRVLTSSKENRGKSDDVPSKDVVRKMKSYWSKLLSAKLITQRKFDNLTKAERGGLTDDDKAGFIKRQLVETRQITKHVARILDERFNTETDENNKKIRQVKIVTLKSNLVSNFRKEFELYKVREINDYHHAHDAYLNAVIGKALLGVYPQLEPEFVYGDYPHFHGHKENKATAKKFFYSNIMNFFKKDDVRTDKNGEIIWKKDEHISNIKKVLSYPQVNIVKKVEEQTGGFSKESILPKGNSDKLIPRKTKKFYWDTKKYGGFDSPIVAYSILVIADIEKGKSKKLKTVKALVGVTIMEKMTFERDPVAFLERKGYRNVQEENIIKLPKYSLFKLENGRKRLLASARELQKGNEIVLPNHLGTLLYHAKNIHKVDEPKHLDYVDKHKDEFKELLDVVSNFSKKYTLAEGNLEKIKELYAQNNGEDLKELASSFINLLTFTAIGAPATFKFFDKNIDRKRYTSTTEILNATLIHQSITGLYETRIDLNKLGGD

SEQ ID NO: 284 - protein, 1129 aa, Streptococcus orisratti DSM 15617
MTNGKILGLDIGIASVGVGVIEADTGKVVHASSRLFPSANADNNAERRGFRGGRRLIRRKKHRMKRVKDLFEEYKLETRFNNLNLNPYELRVRGLTEKLAPEELFAALKNLSKHRGISYLDDAEDDNASAKTNYAKSVLANKELLKTRTPGQIQWERFEKYGQIRGDFDIVTPEGEQQRIINVFSTTDYKKEAEQILETQALYYPQISSEFIEDFITILTSKRKYYHGPGNEKSRTDYGRYRTDGTTLDNIFDILVGKCGIYPDEYRAAKASYTAQEFNFLNDLNNLTLPTETKRLSTDQKKDLVRFATTAATLGPDKLLKEIARMVGCSKDDIKGYRIDNKEKPDLHTFEAYRAMTKLNTFDVATFSREMIDELARILTLNTDREGIEEAIVNDFPNLFSREQIDELIQFRKSKSQLFGKGWHSFSLKLMSELIPELYATSEEQMTILTRLNKMSPERKVTLRTKYINEQDATEEIYNPVVAKSVRQAIKIINECIKKWGEFDQIVIEMPRDKNEDDEKKRIADGQKANAKEKASATEFAASLYNGKKELPDEVFHGHKQLATKIRLWYQQDGKCLYTGQDISIHDLIHNQNQYEIDHIMPLSLSFDDSLSNKVLVLATANQEKGQQTPYQAIPKMKSAWSYREFKAFVLDCKRLSKKKREYLLTEEDIDKIEVRRKFIARNLVDTRYASRVVLTTLQDALEVMNKETKVSVVRGQFTSQLRRQWKIDKTRDTYHHHAIDALIIAASSQLKLWKKQDNPMFEEYEQGQKINLETGEILSDDDYKKLVFQSPYQGFVHTISSKSFEDEILFSYQIDSKVNRKISDATIYATRQAQLSRDRKKETYVLGKIKDIYSQTGYDAFRKRYDKDKTVFLMYQKDPLTWEKVIEVILRDYKEFDDKGKEVGNPFERYRQQNGLMTKYSRKNKGTPIKALKYYDNKLGNHVDVTPDDSKNPVVLQSINPWRADLYFNPKTAKYELLGLKYADLSFEKGTGNYTISQEKYDEIKKREGISAESEFKFTLYKNDLLLIKDIENGEEQVFRFLSRTMPNQKHYVELKPYDKAKFDGGQSLLTVLGTVAKGGQCLKSLNKVGISIYKVKTDVLGYQHFIKKEGNQPKLSFENSIKRHKNK

SEQ ID NO: 285 - protein, 1140 aa, Streptococcus parasanguinis F0449
MNGLVLGLDIGIASVGVGILKKDIGEIIHTNSRLFSAATADSNIERRGHRGGKRLTRRKKHRSIRLHDLFEDFGLLTDFSKVSINLNPYQLRVQGLDNQLTNEELFIALKNIVKRRGISYLDDASEDGGTVSSDYGKAVEENRKLLAEQTPGQIQLDRFEKYGQVRGDFNVVENGEKRRLINVFTTSAYSKEAERILRKQQEFNKKITDEFIEDYLTILTGKRKYYHGPGNEKSRTDYGRYTTKKDPEGKYITLDNIFGILIGKCTFYPDEYRASKASYTAQEFNLLNDLNNLTVPTETKKLSEEQKKTIIKYAKTAKTLGASTLLKYIAKLIGASVDQIHGYRIDPNKKPEMHTFETYRKMQSLETISVEELPRKVLDELAHILTLNTEREGIEEAINATLKDTFSQDQVLELVQFRKNNSSLFSKGWHSFSLKLMMELIPELYETSEEQMTILTRLGKQKSKETSKRTKYIDEKELTEEIYNPVVAKSVRQAIKIINEATKKYGIFDNIVIEMARENNEEDAKKEYIKRQKANLDEKNAAMEKAAFQYNGKKELPDNVFHGHKELATKIRLWHQQGEKCLYTGKNIPISDLIQNQYKYEIDHILPLSLSFDDSLSNKVLVLATANQEKGQRTPFQALDSMDDAWSYREFKSYVKDSKLLGNKKKEYLLTEEDISKIEVKQKFIERNLVDTRYSSRVVLNALQDFYKEHQFDTTISVVRGQFTSQLRRKWGLEKSRETYHHHAVDALIIAASSQLRLWKKQNNPLISYTEGQFVDQVTGEIISLSDDEYKELVFKAPYDHFVDTLKSKKFEDSILFSYQVDSKYNRKISDATIYATRKAKLDKENKEYTYTLGKIKDIYALGTKSPSKTGFYKFLDLYNKDKSQFLMFQKDRKTWDEVIEKIIEQYRPFKEYDENGKEVDFNPFEKYRIENGPIRKYSKKGNGPEIKSLKYYDNLLGKFVDITPSESKNPVALLSLNPWRTDVYYNTETSKYEFLGLKYADLCFEKGGAYGISEVKYNKIREKEGIGKESEFKFTLYKNDLILIKDTETNCQQIFRFWSRTGKDNPKSFEKHKIELKPYEKARFEKGEELEVLGKVPPSSNQLQKNMQIENLSIYKVKTDVLGNKHFIKKEGEEPKLKF

SEQ ID NO: 286 - protein, 1385 aa, Streptococcus salivarius K12
MTKPYSIGLDIGTNSVGWAVITDDYKVPSKKMKVLGNTSKKYIKKNLLGALLFDSGITAEGRRLKRTARRRYTRRRNRILYLQEIFSTEMATLDDAFFQRLDDSFLVPDDKRDSKYPIFGNLVEEKVYHDEFPTIYHLRKHLADSSKKADLRLVYLALAHMIKYRGHFLIEGDFNSKNNDLQKNFQDFLDTYNAIFESDLSLENSKQLEEIVKDKISKSAKKDRILKLFPGEKNSGIFSEFLKLIVGNQADFRKYFNLDEKTSLQFSKESYDEDLETLLGHIGDDYSDVFLKAKKLYDAILLSGILTVTDNGTEAPLSSAMIMRYKEHEEDLALLKAYIRNISLETYNEVFKDNTKNGYAGYIDGKTSQEDFYVYLKRLLAGLEGADYFLEKIDREDFLRKQRTFDNGSIPYQIYLQEMRAILDKQAKFYPFLAKNKERIEKILTFRIPYYVGPLARGNSDFAWSIRKRNEKITPWNFEDVIDKESSAEAFINRMTSFDLYLPEEKVLPKHSLLYENFTVYNELTKVRFIAEGMRDYQFLDSKQKKDIVRLYFKGKRKVTDKDIIEYLHAIDGYDGIELKGIEKQFNSSLSTYHDLLNIINDKEFLDDSSNETIIEEIIHTLTMFEDREMIKQRLSKFDNIFDKSVLKKLSRRHYTGWGKLSAKLINGIRDEKSGNTILDYLIDDGVSNRNFMQLIHDDALSFKKKIKKAQIIGDKDNIKQVVKSLPGSPAIKKGILQSIKIVDELVKVMGREPESIVVEMARENQYTNQGKSNSQQRLKRLEESLKGLGSKILKENVPTRLSKIDNNALQNDRLYLYYLQNGKDMYTGEELDIDRLSNYDIDHIIPQAFLKDDSIDNKVLVSSASNRGKSDDVPSLEVVKKRKTLWYQLLKSKLISQRKFDNLTKAERGGLSQEEKAGFIQRQLVETRQITKHVARLLDERFNNKKDENNRTLRTVKIITLKSSLVSQFRKDFELYKVREINDFHHAHDAYLNAVVASALLKKYPKLEPEFVYGDYPKYNSFRERKSATEKVYFYSNIMNIFKKSIPLADGTVIDRPLIEVNEETGESVWNKVADLNTVRKVLSYSQVNIVKKVEEQNHGLDRGKPKGLFNANLSSKPKPNSKENLVGAKEYLDPKKYGGYAGISNSFAILVKGTIEKGAKKKITNVLEFQGISILDRIYYRKDKLNFLLEKGYKDIELIIELPKYSLFELSDGSRRMLASILSTNNKRGEIHKGNQIFISQKFVKLLYHAKRISSTFNENHRKYVENHKKEFEELFYYILEFNENYVGAKKNGELLKSAFQSWQNHSIDELCSSFIGPTGSERKGLFELTSRGGAADFEFLGVKIPRYRDYTPSSLLKDATLIHQSVTGLYETRIDLGKLGED

SEQ ID NO: 287 - protein, 1392 aa, Streptococcus sanguinis SK330
MENKNYSIGLDIGTNSVGWAVITDDYKVPSKKMKVFGNTDKHFIKKNLIGALLFDEGATAEDRRLKRTARRRYTRRKNRLRYLQEIFSEEISKLDSSFFHRLDDSFLVPKDKRGSKYPIFATLEEEKEYHKKFPTIYHLRKHLADSKEKTDLRLIYLALAHMIKYRGHFLYEESFDIKNNDIQKIFNEFISIYDNTFEGSSLSGQNAQVEAIFTDKISKSAKRERVLKLFSDEKSTSLFSEFLKLIVGNQADFKKHFDLEEKAPLQFSKDTYDEDLENLLGQIGDGFTDLFLVAKKLYDAILLSGILTVTDPSTKAPLSASMIERYESHQKDLAALKQFIKNNLPKRYNEVFSDQSKDGYAGYIDGKTTQEAFYKYIKNLLSKFEGADYFLDKIEREDFLRKQRTFDNGSIPHQIHLQEMNAILRRQGEHYPFLKENREKIEKILTFRIPYYVGPLARGNRDFAWLTRNSDQAIRPWNFEEIVDKASSAEEFINKMTNYDLYLPEEKVLPKHSLLYETFAVYNELTKVKFIAEGLRDYQFLDSGQKKQIVNQLFKEKRKVTEKDIIHYLHNVDGYDGIELKGIEKQFNASLSTYHDLLKIIKDKEFMDDPKNEEILENIVHTLTIFEDREMIKQRLAQYDSIFDEKVIKALTRRHYTGWGKLSAKLINGICDKQTGDTILDYLIDDGKINRNFMQLINDDGLSFKEIIQKAQVVGKTDDVKQVVQELPGSPAIKKGILQSIKIVDELVKVMGYAPESIVIEMARENQTTARGKKNSQQRYKRIEDSLKNLAPGLDSNILKENPTDNIQLQNDRLFLYYLQNGKDMYTGKPLDIDQLSSYDIDHIIPQAFIKDDSIDNRVLTSSKDNRGKSDNVPSLEVVQKRKAFWQQLLDSKLISERKFNNLTKAERGGLDERDKVGFIRRQLVETRQITKHVAQILDASFNTEVNEKNQKIRTVKIITLKSNLVSNFRKEFELYKVREINDYHHAHDAYLNAVVAKAILKKYPKLEPEFVYGDYQKYDLKRYISRFKPSKEIEKATEKYFFYSNLLNFFKEEVHYADGIIVKRENIEYSKDTGEIAWNKEKDFATIKKVLSYPQVNIVKKTEIQTHGLDRGKPKGLFNSNPSPKPSEDSKENLVPIKQGLDPRKYGGYAGISNSYAVLVKAIVEKGAKKQQKTILEFQGISILDKINFENNKENYLLKKRYIEILSTITLPKYSLFEFPDGTRRRLASILSTNNKRGEIHKGNELVLPGKYTTLLYHAKNINKKLEPEHLEYVEKHRNDFAKLLECVLNFNDKYVGALKNGERIRQAFTDWETVDIEKLCFSFIGPENSKNAGLFELTSQGSASDFEFLGVKIPRYRDYAPSSLLKATLIHQSITGLYETRIDLSKLGED

SEQ ID NO: 288 - protein, 1128 aa, Streptococcus vestibularis ATCC 49124
MSDLVLGLDIGIGSVGVGILNKVTGEIIHKNSRIFPAAQAENNVERRTNRQGRRLTRRKKHRRVRLNHLFEESGLITDFTKVSINLNPYQLRVKGLIDELSNEELFIALKNMVKHRGISYLDDASDDGNSSVGDYAQIVKENSKQLETKTPGQIQLERYQKYGQLRGDFTVEEDGKKHRLINVFPTSAYRSEALRILQTQKEFNPQITDEFINRYLEILTGKRKYYHGPGNEKSRTDYGRYTTKKDSENEYITLDNIFGILIGKCTFYPEEYRAAKASYTAQEFNLLNDLNNLTVPTETKKLSEEQKNQIINYVKNEKAMGPAKLFKYIAKLLSCDVADIKGYRIDKSDKAEIHTFEAYRKMKTLETIDFEKMSRDQLDKLAYVLTLNTEREGIQEALDHEFADGNFSQEQIDELVQFRKANSSIFGKGWHNFSVKLMMELIPELYATSEEQMTILTRLGKQKTTSSSNKTKYIDEKLLTEEIYNPVVAKSVRQAIKIVNAAIKEYGDFDNIVIEMARETNEDDEKKAIQKIQKANKDEKDAAMLKAANQYNGRAELPHSVFHGHKQLATKIRLWHQQGERCLYTGKTISIHDLINNPNQFEIDHILPLSITFDDSLANKVLVYATANQEKGQRTPYQALDSMDDAWSFRELKAFVRESKSLSNKKKEYLLTEEDISRFDVRKKFIERNLVDTRYASRVVLNALQEHFRAHKTDTKVSVVRGQFTSQLRRHWGIEKTRDTYHHHAVDALIIAASSQLNLWKKQKNTLVNYSENQLLDIETGELISDDEYKESVFKAPYQHFVDTLKSKEFEDSILFSYQVDSKFNRKISDATIYATRQAKVGKDKKDETYVLGKIKDIYSQTGYDAFIKIYQKDKSKFLMYRHDPQTFEKVIEPILENYPNKEMNEKGKEVPCNPFLKYKEEHGDYIRKYSKKGNGPEIKSLKYYDSKLGNHIDITPKDSNNKVVLQSVSPWRADVYFNKTTGKYEILGLKYADLQFEKGTGTYKISQEKYNVIKKKEGVDSDSEFKFTLYKNDLLLIKDTETKEQQLFRFLSRTKPNVKHYVELKPYDKQKFEGNESLINVLGAVAKGGQCQKGINKPNISIYKVRTDVLGNQHIIKNEGDKPKLDF

SEQ ID NO: 289 - protein, 1366 aa, Lactobacillus composti DSM 18527
MTKDYSLGLDIGTGSVGFAALDTNYRLLRAKGNNVIGVRLFTPAETAEERRGFRTARRRLSRRRWRLGALNGIFAPELAKVDPNFLHRLKYAWVHPADQQNKGKYSAAPLFNDAALDRQFHDDYPTIYHLRLKLMTDTSQHDLREVYLAIHHIIKFRGNFLRGEGPINASEAFDINTFIDQMTAFYDQAFPDFKIVDQVDQQIIFKGLTDMTLSPADRANKALMGFNNAAQQPNKRIFKAILSGLVGNQVDLMAIFQLDGIPKEDQKEFKFKFVDNDIEEKLAALGDNPALSDEQNEFLTTLYAAFSGLTLKGLLGDATSISAAMVARYASHRTDWTYIKDHVLTPQNNRELRLAYADLMTDNEDVRLKAGKKFAKAIEAADIPAAKKSEFSLKIDNNEFLPRQRTKANGTIPHQLHLNELQQIIENQGQYYPFLKATFEQDGHTLNKIEGLVKFRVPYYVGPLVPKHKVAGNNANHWMVPKEPGAITPWNYTEKVDRDKSGNEFIRRMTGTDTYLLGEPTLPKNSLVYQEFNVLQELNNLRIEKRRLDIAVKQDIFEHVFKTNKTVTVKRIEEYLTTEFGSPVTLSGFANVNERKLNSSLSTYHYFVGIFGAEFVDDPKNLTLLEQIVELQTVFEDRKALQRQLKLRPELSEKQVKQLARTHYTGWGRLSQKLLTSKIVHVALEGEREPGQYSILETLYGTQMNFMEIVNDMKDRYGVKSWLDQENSGSENNLSLKQRILDMPGPKNIKRGINQAFHIIDEITRAVGNAPSRIYIEFARESQQSNLTNARVNRLKQLYSNQALKKEFAKLASEIKDLTKEQLKDDRLYLYYLQQGKDMYTETDIDITKISSNYQIDHIIPQAYTKNNSLDNRVLVNSEMNARKSDSPTFLPSLIQERKAWWRQLRDTGLMSTIKYNNLTRTSDDFSADQKERFIARSLVETRQVIKNVATLIKEYYDDSQVEALPSEITAEMRRYLNVRKNRDINDYHHAHDALLFATAGEFSRKVGIMEKGRVSDGAGNIYNRYTKDIIQRARAKAGQDKKVRPFTFIVGSMANPDTKFQTNQTTGEIVWTPEDVAYLRKVIDYKKMLVTKMTLDQTGTLYNETRYGSGDKHVAVALSKDKAADLYGGFGSLKPAYAALVYSKKKFRLVNVLRLWLPEIKKNASVLERKVQSVLGDDNAKVIRAHVPCGQLLIKDGALVTVSSATELHNFRQLWLPKADYQDISILLGAPDKVTAENRLQAESHFDDVDQRFESLLKDVIDQARQYYPLKTHQTSLEKLIGKIGKFDELKFAQKQQVFSRLLSALHANATNSDLKQIGLSTAWGRLIYPKGVSLTDEDKLINSSFTGLFNDVMSIKEFHDFSIN

SEQ ID NO: 290 - protein, 1366 aa, Lactobacillus concavus DSM 17758
MDKKYNIGLDIGTSSIGFVATDEDNHVIRAKGKNVIGVRLFDEGQSAAERRGFRTTRRRLNRRKWRLNLLREIFEPHIYPIDASFFMRQKYSNLSKQDPNQKIEFKDILFSDKSDAEFYRQYPTIYHLRQALMTEKRQFDLREIYLAIHHIVKYRGHFLDETPTDKFSFDQLDLTQEFERLNVLFSEQNPEEPFEIVVNQNQSIEDILSNQSMTASDRRKQALVVFYQQSENKENEKQYKAIATEILNLLLGNKAKLNVILAQEVDKEAAKDWSLSLSSETFDDDLEKASSGLNDSQLEMVGIFERIYSSLILKSIIGDHNSLSAAMVDKFKTHAQHRDLLKDVIKNSDATKGEQLQFAYDHYLQRHSADGKAYGKDDFYKEVKKNLDDSDAAQQIQQLIDTDQFMPKQRTKANGAIPHQVQQKELDLIIENQCQYYPWLAEENPNSERHNVAKYKLDELVSFRVPYYVGPLISPADDETDPQAIQNTKFAWMIRKDAQGRITPWNFDDKVDREKSADKFIKRMTTTDTYLIGEDVLPDQSLIYQRYKVLNELNNVRINGRPIEVQIKQNIYTDLFKKFKSVSVKKLRSYLEEMSYYPGSFKISGLTNPGKFDNGLTSYLDYKNILGDSVDANDKRADIEQMIEWSTIFEDNKIFAQKLESMTWLTAEQRKAISRKRYTGWGRLSNKLLTQLKNQDNRSIMDLLWETEENFMKIQSAPDFSKMIEAHNQQFIKNEANIQQVISDLYTSPQNKKAIRQILLVVDDIQKAVGHAPEHIAIEFAKGEDKNPRRTISREMKIQDVYQQISDDILVSPEVRAQLNEKIENRHGRLSDRLFLYFMQGGRDMYTGKPININNISHYDIDHILPQAFIKDDSLDNRVLVSDKLNREKSDTVPRDLFGREMMSTWEKMADRGLITKRKLANLKTIPGSIDAHKAQGFINRQLVETRQVIKLAVGIMIDQYPETQIVSVKANLTHEMREMFDLVKNRDVNDYHHAFDAYLTAFVGNYLLQRYPKLEPYFVYDKFKKLKDQNISMRDFNLLYDLKKNEDVYDQRTGHSAHKIWDQHGSIDYIRHLFAYKKILVSHEVHQNGGALYNMTVYGKADDAKRKLIPIKADKPTELYGGYTSRKLAYMAIVKTKKGKKEQYQVTGVPVSALTTLRQFKEDSPEQKQALEEIVRRNFDEKTEVEIIVPKVLFNQLIVDEKCRFMVGSDTYRYNAQQLVLSADDLEIINASHKDIQTIDSSDYSQQLDQVYQNILTIVDKHFPMYDINKFRTKLHDIYEQYIELPNEDVWENNKLTTLGKHTIIIRILQGLHANATVVDLKQLGIKTPFGFMQQARGIVVSPDAQLIYQSPTGLYERRVRLGDL

SEQ ID NO: 291 - protein, 1319 aa, Weissella halotolerans DSM 20190
MAYSVGLDIGVGSVGFAGIDNQYNLVRTKGKNVIGVRLFDEADSAAERRGHRTNRRRLQRRRWRLRLLDDIFAKPLQAVDPNFLARLKYSYVNKKDQGQQDHYYGGYVFGSTAADQAYHQAYPTIYHLRKRLMEDDQKHDLREVYLAIHHIVKYRGNFLNPQSSLDIDQQFDVTDFAQALARFADHQALSWALEAPIRFLEAELATGLSNSARVDAAIEAFSFDTKVDRAAIKEMLKGLSGNQIDFTKLFVNVDSADWDQEERKQWKMKLSEEDFDEQALPILERLSQDETEFFLAIKRAYDGIALMRFLGDEQSLSSAMIKAYEDHRRDLTFLKTQVRTPQNRQALSEGYTNYLSVDDKKHKRGAKELAQLIEASDASEQDKATMLDRIANDQFAPKQRTKANGLIPYQLHLAELKKILAKQGQYYPFLLDTFAKQGQSVNKIEELVQFRVPYYVGPMVPKSETAGNAENHWVEKNDGQTKVSVTPWNFDQVFNRDRAAKSFIDRLTGTDTYLIGEPTLPRHSLTYETFTVLNELNNIRIDGKRLPVETKQAIVEDLFKKYRLVTKKRLQDYFASFGKREVELTGLADESRFTSSLTSYHDLQGLLGTDFITNPQNHSLLEKIVEIQTVFEDSDIAERELGKLGLEQKLIPRLAKKHYTGWGNLSRKLLDTSFIHDPERPEEPVSIMDLLYTTNKNFMEILHDSEYGVEEWLKSQNMIDDQKDIQMRIDELTTSPANKRGIKQAFNVLDDITQAMGEEPAYVYLEFAREKQASRRTVSRKKRLETLYKNAALKTEFKAIKEALAEESDDRMQDDRLYLYYAQLGRDMYTGQSISIDQLSSHYDIDHIVPRAFIKDDSLENKVLVNRTDNARKTDSATFTADVKAKAFPLWQQLKKLGLISAKKFRLLTRTGDFTEMERERFIARQLVETRQIIKNVAALIEGHFSQTQAVAIRAEVTGELRQLTQIKKDRDINDYHHAQDALLVATAGTYLHRHFPKRDARFIYNEFDYYTQHWLKNQGENRRRHPYSFVVGTMSKGNEDWTPDNLNYLRKVMQYKTMLMTRKPVGPEGALYKETLIAADPKKRLVGASKERQDPTIYGGYTKESSAYMSLVRAGGKNQLVKIPVRIANEIHSGQRKLDDYVQAKVKKFERILLPKISLGQLVEDEGQRFYLATNEMKHNAKQLWLDQKVVTTYKRLTAESPVEDFLTVFDALTSSATIHHFKFYQRDLELLRDNRAGFQDLAKATQLKVLKDVLYELHDNAGWRDPIKQYFKEIGLKVRMWTKLQKEGGIKLTDQAELIYQSPSGLFEKRRRVQDLL

SEQ ID NO: 292 - protein, 1370 aa, Weissella kandleri DSM 20593
MEKNKEYVIGLDIGTGSVGWSAISTDNYQLIRQKGKNLIGVRLFNSAETAEERRGYRTTRRRLSRRRWRMSLLNDIFRPELNEIDENFLARLKYSWVSPLDQKNPQLNEQGTNASLYGDIEADQAFHRAYPTIYHLRKTLMEDNQKHDLREVYLAIHHIVKYRGHFLTPDFDANSQTIDIKGLFKQLGDVSGSIELQADQTSTVIAAFQSILLDFTKTPTESGRLAGQLFSDQNKDKQAKKQVEELFKLLRGGKGSLADMFLLTDLDKVVKNQLKFAFDDAVDENLNLISNLINEEQYELLLNIQKLRGTIILKQILGDDETVSDAKVRSYEEHAHQLKELKAQVLTKDNKEKFEEAYQLIQKGDASRIDGLKKLKTIINQEHEALRLDKYEADKLLKLIELDQLLPVQRSKRNGEIPHQLHEFELKKIIEKQGRYYPFLRETFERDGQEFNKIGQLVNFRIPYYVGPLVDPRLAGIQSGDQTNHWMTQKKAGKITPWNYTELIDIDKSAAEFIKRMTGTDTYLVGEPSLHKASLIYQDYNVLQELNNLRYDGKPLPVDAKQEIYSNLQVSLKNATKNKINSFLISEGYLQDGEELTGFAGKELKNKLSSFHYFKNIFGPERMNTLGTDNLEKITELQTVFEDRHMLKRQLQKLGFLDDDECEKLAGKHFTGWGNLSKKLLNTPAIIDPEINENKISLIDALYKGQRNLSFYVNNMDDKYQFRDWIESENQSQQVEISLDEKIKNLAGSPAIKRGITQSMAVIQDIIRANNGISPKRIYLEFARESQNSYQPNSRIKQIEKIYDQNKKELMKVYPDVFKDVQGVLNNVDENNSLSEKAFLYFMQLGKDMYTGEALDFDKLYTYDIDHIIPQAMTKDNSWDNKVLVTAIKNREKSNQVLDNAIQAKMHNFWLQLKKVNLLSQRKYDTLMKTNFSKGDEKKFIARSLVETRQIIKNVAELIKSEFDHVEAIPIRQELTSDMRQLMDYKKNRLVNDYHHAHDALLIATVGEFMQKRGFMQGMNPSQNVYHGYTQYVKKWLSMAKKARSAEKPERIFPLQFVVGSMRMAVRDGQVDKVTHPATGEICWTADNEAYLRKVLGYKNILVTRKVKNAGKLYQRVTVKPKGSGEAPVNHQKSDINIYGGVTSEQAAELVLIRIKAKNNAKNMVIKIPTAIANQVANKTTTYDAYVRSLNIPNYAGIILDQIPLGQLVFDERTSFYLASAEIKHNARQLWVNQHINNVLTKKNINDEERDNILNLLTNEKNLERFKLLEPDLKRVKAAKQQWASCDDQEQMQILRIIINKMHDDASPQIPGKIDPFKNYLDKQGKGWRDLRTKKGMKLSDNAEFVYQSPTGLYHRKISINELLKQKQLE

SEQ ID NO: 293 - protein, 1399 aa, Olsenella uli
MNLRNTTDEYNIGLDMGTNSVGWAVTDKAGAIAHFKGKPTLGSRLFDAAQTAAGARIHRSQRRRYVRRRWRLDLLQSLFQDEVSKVDSEFFCRLRQSRLYVGDREKGHADYTWPIFNDSDFNEVDYYKRFPTIYHLRKWLMETDEKADIRLIYLATHNIVKHRGNFLRENNKSLSSRDANPAQAVKSLRLALNDWCSERDYECAWKGEEDDGAIDEAILNVLADGEKGRSDQAKEIAKLTGVDCGDAKQSKQCNEAIAKAIVGLKVEMKNIFGEFPAEKTSYIYLSSDEDVEAVRESCPDDSGELFQALCKLYSAYILQELLSYADPSGQTISANMVAKYKQYGRDLRLLKELTRTYAPQKYDLFFRGETYAGSSDYVVDEARGYTRYNLGTTKANYDDFQKSVKELFKGTDALQDERYQEMMVAFGEQKFLRRLKTSDNGSIYYQLHLEELHTILENQGKHYPFLLSEEDKIESLVSFRIPYYVGPLTRKNAAIGHDGKERFAWSSRKDGMEHAVITPWNWEEIIDRDKSAEDFIMRMTGDCTYLQGEPVLPKCSLLYEEFCALNEFNGAHWTVDGDDERRFDAAQRERIMCDLFRRTRSVTYNKVSDWLERKYNFTGARVRGGQGEHGFESKLGSYIFFCKDVFKTDGLDEADYTMIEQIILWSTLFEDRDILKRKIEEAYGGDRLTSEQIKVICKKRFTGWGRLSKRLLTDIKVNTDTGRKSIMDVLREGNPNNGQRSRTMVFMEVLRDEDLGFQKAIDGLNRDYFREHNNGLMDVNDLPGSPAIRRSINQAVRIVDEIASIARKEPTNIFIEVTREEDDPRKKGKRTKRRYDAIKSALEKFKKDDPSLWKELCEKAPGDMDERLSLYFMQRGKCMYSGRPIKIEELHTGKYEVDHIIPRSYIKDDSFENKVLVYREENQHKTDALLIDSSIRQKMGGYWRMLHDAKLVGDKKFRNLFRNHIDDKAMKGFVARQIVETSQMVKLVQTLFEARYPNTRIVPVKAGISHDLREAAGLVKCREANDFHHAHDAFLACRIGLFIQKRHPSVYDNPIGLARIMRDYARMQAREYKKSHCLAHTQGFIVNSFLSSGFDEETGEIFKDDWDAKAEVEGIRRVLNCRQCFISRMPVEGDTRYGGRYWGETIYSPKGKHKHEIPLKQGLDPNLYGGYSDLLYSYFLIYEASDVSSGERVLRFIGIPTSIAARMANQKRLEEYVSRLALQENLEHVRMVRKIMKKQLIEVDNCRLLVTAADAVTNATELAFSLDEMKIISTCAKCINGADPSAIDKIGNAQDSFFDNLKRRGSDRCALLFSQLKLDKLSQNFYMISSDDKSKILISILDRIRAKSNSVDLSLVGGAKHAAQMKFDFNAKLNNPASSFVLIDQSVTGMFERRTRIGL

SEQ ID NO: 294 - DNA, 3720 bp, Bifidobacterium bombi
atgtctcagcacaggcgctatcgaatcggcatcgatgtaggattgaattccgttggtttggcggccgtcgagattgatgccaatcacgataatccattggatgagattcctatcagcattctgaatgcgcagtcagtgatccatgatggaggggtggatccagatgaggcaaaaagcgctacatcgcggagagcaagcgcaggagtcgcgcgtcgaacccgaaggttgcataaaagcaaacgtcaacgtctcgcaaaactcgacgaagtcctgaacgaactcggataccctgtcgaagacgagtcgcaattccctgccggatcaaacccctacatcgcttggcaggtgcgtgcgaagctcgcggagacattcattcccgatgttgaaactcgcaaaaggatgatatccatcgcaatacgccatatcgcccgacatcgtggttggcgaaacccgtacagctcagtagccgatgcggaacgtatgtcacatactccctcaccgttcatggtcgagtatgccaaaaaacttgatttcgaaataaatgacagaagaaccaatggcttttaccattctccttggcaaagtgtggatgaggaaggcaaaaggctatccaaatcagaattggaaaaacaaccaaaaatcgaagattggaacgacaatccaatcaatggaaagaccatagcccaattggtcgtctcttcgctagaaccgcaaaccaagatacgcagggacctgacacacggacttcaaactgaatcgacgttgaatattcagaccgagaaactgcatcagtcagactatattcacgaattagagaccattttcgagcgccagcacgttgatcagacgacgcaagaacaattactggaggccactttccataccaaaaatccaaaggcagttggagctgctgcaaaattggtaggaaaagatgcccttgactctcggtactatcgagccagtcgagcaactcccgctttcgaggaataccgggtcatggctgccatcgacaccttaagaatacgtgaacatggaacagaacgtcaactcacaacagacgaacgccgaaaactgtttgacttcatcaagggactgccttccaaaaaaacgaagaacgaaccttcaattagctctcttacttggggtgatgttgctgactttctcggaatacaacgaatcgacttgcgcgggttaggctctcttaaagacggagaaccggtgtcggcaaaacagccgccagtcatcgaaaccaacgacatcatgcagaaggcccctgaccctattgcagcttggtggtcacaggcgaacactaaagaacgagaccgtttcgtcgagttcatgtcaaacgcgggcgcaataaaagatacatcagatgaagttcgtaacatcgatgcggagatttcacaactgttggaagaactaacgggctcagagctcgaatccctcgacaagattacccttacttcaggaagagcagcatacagctctcagacgttacgcaacatcaccaactacatgtacgaaaccggctgtgatttaacaaccgcacgccaagagctctatcatgtcggcaagaactgggctcccccagctcccccaatctatgagcataccggcaatccatcggttgacagaacgttcagcatcattcatcgctggctatgcaatatgagagaccagtatggtgaaccagaaaccgtgaacatcgagtatgttcgagatggtttctccagcacgtccacacagctggctgaacagagggaacgcgataggaggtatgccgataaccttaagatgttgtctaactacgaaggagcaagttcacgctcagacgtccgccgcatcaaggcacttcaacgccagaattgccaatgcatttattgcggacgtaccataacgttcgagacctgccaaatggatcacgtattgcccagaaagggccctggatccgattccaagttcgaaaatctagttgccacatgcggcgaatgcaataaaagcaaaagcgataccctctacatgaattgggcgaaaacgtacccaaatactaatttgcaagacgtcctgagacgaattcaggagtggagcaaagatggttggatgaccgacaagcgctggagacaatataaggaagcgctgattctgagattggaagcaacggagaagcaagagccactggacaacagatccatggaatccgtctcatacatggcaagggaactgcgcaatcgcatttacggtttctacggttggcacgatcaagatgacgcactcaaacaaggcaggcaacgggtattcgtttcatcaggctcgatgaccgcagccgcacgaagaacgccatttgaaagccctctgatcaaaggcgcagacgaagagacgtatgaatcatcattgccctggcttgacggtatgaagggcaagacccgtctcgataggcgtcatcatgccgtcgatgcgagcatcatcgcgatgatgcgccctcagattgtaaaaatactgacagaagcacaggagattcgttctgagcagcacgacaagtacaggaaaggtcagacgccggactacgtgtgcaagcgtcgcgattattggcgcaattggagaggcacgccagacacgagagacgaagaggtcttcaactattgggctggcgagcagctaagaacgcttacggatcttgtgagccagaaaatggcggatgatgaaatacccgtcatctatccaacaaggctccgactgggcaatggaagcgcacacaaagataccgtcgtctccatgatgacaagaaaggtcggagacgaattaagcatcacggccattaataaagccgaatccggtgcgttgtacaccgcgctgacacgggattctgatttcgattggaagacgggtttgtcggcaaacccgaaccgtcgcatcagagttcacgataagtggtttgaagctgatgacaccatcaagttcctggaaccggctgttgaagtggtgctcaagaataacacgagagccagaatcgacccggaagcgcttgataaagttcacagtacgctttatgttccagtccgcggtggcatcgcagaggcaggaaattcaattcaccatgtacgcttctataaaattccaaaattgaattctaaaggcaaacaaacaggtagcatttatgccatgcttagggtgctgaccatcgatcttgctatgaaccagtacgataaagaaaccggcaaaaaacaagatctattcacacttccactcccggaatcctcattaagcagaagattcagcgagccgaagctacgtcaggcgttgattgacggcactgccgaatacttgggttgggctgttgtggatgatgaacttgaaatccctgcattcgcaaacgccaggataaccgaagaacaggccattaacggcagcttcacagataggttgctccattccttcccaggaacccataagttcagattcgctgggttcagtcgaaacacagaaatagcaatcagaccggttcagctggcatcagaaggattaatcgaaacagacgaaaaccgcaaaaggcaacaactacgactcactcaacccaatacagaatatagcaacagtattaaaaatgtcctaaagagtggcttacacttgaaagtcaacacgttattccaaaccgggattctcgttacccgtgccaactctcagggtaagcaaagtattcgattctcaacagtagaagaataa

SEQ ID NO: 295 - DNA, 3366 bp, Bifidobacterium dentium LMG 11045
atgtctgtgggattggccgcaattgaagtagacgaaacaggctttcccatcagaatcttgaacattcagagtgtaatccatgatggtgggatcgacccgcagctaggcaagaagaagtcgatatcccgcaaggccatttccggcgtcgctcgaaggacccggcgcatgcgcagaagaaaggtcgtgcgtcttcgtcagttggatgcgactcttgagagtttaggcttcccgattgtcgaaccggattccctagacacttgggagatttggctcacccgcgcgaaattggcgagttcttatattcaggatgacgagacccggaaagaggatgtctctattgcgttacggcatatcgcacggcatagagggtggaggaacccatattcgaacgtcgagtcgctgttcgtggacgtcgcaccttccgaacaatacgaagagcttagaagaaaggccgaggaaaagctcggcacgagtctgtccggcaacccgacttccgcggagatcgtcgaatgcatcttgaagagacaggttggtgaagtccagttgcgcaccagaagccgtaagggcgtgaatggcaatgcggtggaaaaagaaggactattgccgacgaagttgatgcagagtgacaacgccgcggaaattcgcaggatattcaaggtccagaggatagacgatgagacggggagaaaactgctcagggcggtcttcaaggcgtgctccccgaaagggtccgtggaacggagggtgggtagggacgccttggctcccggacttccccgtgctcttaaggcatcgttggcgttccaagagtatcggattgcaaatgtcctcacgaatctcgtcatttcagaagatgggacgaagagaaaactgacaatcgcggagaaacagcgtgtctttggttttctttcttccaatgagaccgatgacattacgtggattgatgtggccgaaaaattgggattggaaagaaggcagattcaaggcgtcggctgtctgaccgccgatggcgaagaaagaatctcctcgactccgccacgtaacatcaccgcgctgcacatccattcggcgaaaccggtaataagggaaaagctcgttgcgtggtggaaggctgcgtctcccacggtgcgggaaaccatggtagagctcctttcgaatacggtcgatattgaccgcgtccgcgaagacatggactactcgtcggcggtcgcgttcatcgattccttgggtgacgaggaactgactgcgctggattcggtggatctcctgtcgggacgtgctgcgtattcacgtcagacattgaagcagctgacggaaagaatgctgaatacagatgacgacctgcatgaggcccgcaaggcggtttttggcgttgacgacaattggaagccgccagtcgatgcaatcagcacgtcggtggggaatcccgccgttgaccgtgtcctgaaaatcgtgaacagatatctgttggcatgccagaaacggtggaggaatccccagagcgttcagatcgaacacgtgagggagagcttttcttccgtcgccaaagcgaaagagacggaaagggttcagggtgaaagagcacgataccgcaatgatctgaggcgagagctttgcgagcaggaaggacttaataagatacgtgaatctgacatcagacgttgggaatcggtccaaaggcagaatggaacgtgcctgtattgcgggtcaccgataacattcaggacctgtgagatggaccatattgttcccaggaaaggcgttggctcgaccaatacgcgggtcaatctcgcggccgcatgcgcggcatgcaacaagctaaaatccaatacagccttttccgtgtgggcgagaacggagggcgcggccaaccgtaaggtcagccagcgtgacgcaatcgaaagggttaagaccttcatctttaacaagtccgtgccaccaagagagcaacgcgcgttcaaacaggccgtaatctcaagactgagacaggccgagtcggatccggcaatagacaatcgctcgatcgaatcagtggcgtggatggccgatgagctgcatcgccgcattgaggcgtatttcaatcaggatgccgatgtgtcggggaatactccagccacccaagtgtgggtgttccaaggccgggtgactgcactggcccgtaaagccagcgggatcgaagggcgcatccatttcgcaggagagtggaaaaagacccgtctcgacaggcgacatcatgctgtcgatgccgctgtcatcgcgatgatgaaccattccgccgcgcaaaccctggttgaacgtgattcgcttcgcctctcgcaatggataaccaggaagccggaaacatggaagaactatcctttttcagaaggtcaaaagaaaacgcgtttcaaggaatggctcgactgcatgaatgcgcttctggaccttctgaatgacgcactcgactcggaccgtgttcccgtcacgcgttgccagaggatgtctctcggcaattcccaggcgcatgctgcgaccatcagaaaaatgaagcgtgtggaacttttctcgcctatggatgccgatttgatacgcagagcatccacgcccgcattatactgtgctttgacgagattgccggagtattctcccgagaagggtctgcccgagaatcgtggtcgtgagattgtgctcaacggcaggcatattcgatcaactgagacagtcgatttctttgcgagtggtgccgcccagctaatggtacgtaacggatccgccgaaatcggggattcgattcaccatatgaggatataccgttatcgaaagactggggcaaaatcgcaggaatacgtgtatgggatgatccgagtattccagattgaccttctccatgcgtcgtcggagaatctttttgcggtccagcttccgtcccagtcggtttccgtgagatacggggacaagaatgtggtccaagcgatacaagaggggcgtgcggagtatctcggccatatcgtccctaacgatgagatcctgattagctacgaaggcgtccggatgaaagacagcgagaaaatcggtgcatacgcgaatgatttcagtggtaccgcatccgagctcgcgcagcgacgacactgggtggttgtcggatctgatgtcagtaagttggccttacgtccctcttatctttccgaagaaggactagaaaacagcggatcggaatctgaacggctttcaaagcagacacggaaggtgatcgaaggcaaaggatgggtcgtcgcggttaatatactggccaaataccatcctgtcgtgataagacggaatgcgttgggcgagccaaggttccggaccaattccgggatgcctgtctcgtggcgctgggacaggtag

SEQ ID NO: 296 - DNA, 4173 bp, Bifidobacterium merycicum LMG 11341
atgagccggaagaatatcgttgaagattacgccatctcgctggatataggcaatgcttctgttggttgggtggcgttcactcctaattatcgtcttgttcgcgcgaaggggcacgaacttattggcgcaagactgttcgaacctgcttccacggcggaagagcgcagaatggcacgaaccactcgtagacgttactcccgtcgtcgttggcgtctacgtatgctcgattcgatgtttgaccaggcgttgtccgaggtggatccgtctttcctgatgcgaaggaagtattcttgggttcaccccgaagataagaataatgaagctcattggttcggtggcgtcctgtttgactcgaatgagcaggataaacgtttttacgagaaatacccgactatctaccatctgcgtaagagtctgatggaagatgatgagcgtcatgatatccgagaggtgtacctcgccatccatcacatgatgaaataccgtggcaatttcctcacggaaggggaattggccccttcttcggttttcgatgtcgaggattttctcaagttgctcacggaaattctgcaatatgctgatgaaggcgaaactgacgaggatctggagctgcaagcggatgcgaatgggctgacggaagcgctgtgcacgaccaaaggctctcgctccatacgtgctaagaatgcaatctccattctcaaggaaggtgccgcattatcgaagcgccaagaggctatcattagcgcagtgtttgccggtcttgaaggcaacaagcttgatttgacgaaggtgtttcctaataaggaatacactccggaagacaagaaaacgctcgcgctctatttcaacaaggccgattatgacgagaagcgtgtcgcaatcggtgattctggtctgctggaagataatgaatgcgattttctggactgtattcggcgacagtacagtgccatcgctctgaaacagttgctgggagatttcacaagcatttctgagtcgatgtgcgcgagatatgaacagcatcaacggaattgggacttgatcaagcgctattgccgcgaggaatccaatgcagaaaatatcaacaagaactacggcgctctcgtaggctgggaaatcgttggaggacagcgaagaagcattcgcggtgcaaaggattatgagaacaagcgcaaagcagccaacaagttctttgaggagctgattaaaggttctgctttgcctgatcaggagaaagaaagacttctccacgacatcgaaaacgatgagttgttccctgtccaaagggactctggcaatggcgtgattccctaccagcttcatctgaacgagttgaagaaaatcatccaaaaacagggacggtattatcccttccttctggagacctatatcaaagatggtaaggaagtcaataagctagaaggtttgcttgctttccgcgtgccttattatgttggtccgctggtatcgcgtgatgacatgcagtcgtccgataatagggaaaaccattggatgattcgcaggaagaagggcgtgattacgccttggaactttgacgagatggtcgacaaggataagtcgggacacgaattcattaagagcttggtaggcacggacagttacctgcttggcgagacgacgttgccaaagaattccctgctgtaccaggaattcgaagttcttaacgagttgaacaatgtccgtctgtctattcgtacaggcaaccattgggctgataagcggcgcgtgagactcggccacaatgagaagaaactgttgcttgaagaactttttgccaaacaagcaacggtcaccaagaaggctgctgaaaatctgttgcgcagaacatatgggaacacctatgagatttccggcttggctgacgagaagaaattcgtcagctccctgtcttcgtatgggaagatgtgccgcacgctcaaagcctcctatgtgaatagtcataaggatgtcgttgagaagattattgagttgcagacggtgtttgaagataaaaagactttgaaacatcagctgcagctgcttggcgagctggcggaaaccaattgcgagctactctccaatacgcattacacaggatggggcaagctgtcaagaaagcttcttacctcgaaggtagttgtttgcaagatcgggaatgatttcgctcctgcaaaacacagcattatcgagataatgcgggaaaccgaccgtaatttcatggagatcatcaccgacaaggatcttggcgtcggggagtggattaaccagcagaacgttggcgccgaagatgggaactcctatcaggatataatcgatgacctgcgtgtttcgcctaaggtcaagagaggtattaatcaggcgattcgagtcattgatgatatctcgaaggcagtaggcaaggaaccgtcgcggattttcctggaactcgcgggagatgtccagcaaagcgcccgaacggtatctcgaaagagccgtttgcaggggttgtacaagagtgctggattgcagaaggagttccgggacctcgccgaatcattgaacgagtgcagtgataatgatttgcgagacgataggctgttcctgtactacacgcagcttggtaaagatatgtataccggagaacccctgaatcttgacaggctctcttcggattacgatatcgatcacatcatcccacaagccgtgactcagaatgattctctggataatcgagttttggtagctcgcgtggcaaacgcgagaaagacggactctttccagtatctgcccgaaatcgcgaaccgtatgaggaatttctggcaggagctgttggacgctggtctgattagtcgtgttaagttcgacagactgaaccgtcagaatgatttctcctcccacgagaaggagcgtttcgtccagcgctcgctggtggagactcgtcagattatgaagaacgtcgccaccatcatgcgtaagcgttatggaaacagcgctgcggtaatcggtttgaattccgagctaacgaaggagatgcgtcaatatcttggtttctctcataagaatcgtgacattaacgactatcaccatgcacaggatgcgctatgcctcggtattgcgggccagttcgccgttaataggggcttcttcgctaatggtatggtttccgatggggcagtgaattcctacaatctgtatctgcaggattacctgcgcggatacagggagaaaatgagtgctggggagcgcagaagaaataaagcgtttggctttattgttggttcgatgaattcccaggattcagacaagcgtatcaatcctaagacgggagagattgcttgggatgatgaagataaagtatatcttcgcaaggtgatgaattaccgtaagatgctcatcactcagaaggtgggtgatagctttggcgcgttgtataacgagacccgttacggaacttcagcgaaggaaggtgtcaatggcatccccttcgataagcacaagcaggatactgctttgtatggcggcttttcgagcgcgaagacggtctacgtcgttctgattgaagcgaagaagaaaacacgtctagtgaatatcacgatgcaggaatacgccgagttgggagatcatccttccgacgatgcactgagagcggttctggctaagaaaaagccggaatatgggaaggcgcgcattctgctacgtcacattcctccgatgcagctgattcgttatggtggggccttggttacggtcaagtctgccactgagctgaataatgctcagcagctatggcttccatataaggaatattgtctgttcgatgatgtgataagttctgcgatcgatgtggatgaagcgcggctttgccagatgcttgacgtgattttggatgccatacagaagtattacccgaagcagcgttttgacgagactggcttgtctgctttccacaatgctttcaacgaggtttctgcggaagacaagaagagaattgtcggggaaatggtaggaatgctgcatgctgatgcaaagaatgcgaacttgaaagctcttggaatgagtgggaggtggggacgcatgagtaatcagtcaggatatacttttgctgattctgacgagttcatcttccagtcgccgtctgggctgtttgagaagagaatcagtgttggcgagttgaagaagaggagagcgagataa

SEQ ID NO: 297 - DNA, 4035 bp, Kandleria vitulina DSM 20405
atgagtcaaaataataataaaatttataatattggattagatattggagatgcatctgtaggatgggctgtagtagatgagcattataatctattaaaaagacatgggaaacatatgtggggctcacgtttatttacacaggcgaatacagctgtagaaagaagatcaagtcgttctacaagaagacgttacaataagagaagagaacgtattagattgttaagagaaattatggaggatatggtattggatgtggatccaacattcttcattagacttgcaaatgtatcatttcttgatcaggaagataagaaagattatctaaaagaaaattatcattcaaattacaatttgtttatagataaagattttaatgataagacttactatgataaatatcctactatttatcatttaagaaaacacttatgtgaatcaaaagagaaagaagatccaagattaatttatcttgctttacatcatattgtgaaatatagaggaaatttcttatatgaaggccagaagttctctatggatgtttctaatattgaagataagatgattgatgttttgagacaatttaatgaaattaatctgtttgaatatgtagaagatagaaagaaaattgatgaagtacttaatgtattgaaggaaccactatcaaagaaacataaagctgagaaagcatttgcgttgtttgatactactaaagataataaagctgcttataaagaactttgtgctgctttggcaggaaataaatttaatgttacaaaaatgttaaaggaagcagagttacatgatgaggatgaaaaggatatttcatttaaattcagtgatgccacttttgatgatgcctttgtagaaaaacaaccattattaggtgattgtgtagaattcattgatttattacatgatatctatagttgggtagagttacaaaatatactaggttcagcacacacatctgaaccatctatttctgcagctatgatacagagatatgaggatcacaagaatgatttaaagttattaaaagatgttatccgtaagtatttacctaagaaatattttgaagtctttagagatgaaaagagtaagaagaataactattgtaactacattaatcatccatcaaagacaccggtagatgaattctacaagtatattaagaaactgattgagaagattgatgatcctgatgtaaagacaattcttaataagattgaattagaatctttcatgttaaaacaaaattcacgtacaaatggtgctgttccttatcagatgcagctggatgaattaaataaaatcttagagaatcaatcagtttattactctgatttaaaagataatgaagataagattagatctattcttacttttagaattccttattattttggtccacttaatataactaaagacagacaatttgattggattattaaaaaagaaggaaaagaaaatgaaagaattctcccttggaatgcgaatgaaatagtagatgtagataagactgctgatgaatttattaaaagaatgagaaacttctgtacatacttccctgatgaaccagttatggcaaagaattctttaacagttagtaagtatgaagttcttaatgaaattaataaactaagaattaatgatcatcttattaaacgtgatatgaaagataagatgctacatacattatttatggatcataaatctatttcagctaatgcaatgaagaaatggttagttaagaatcagtattttagtaatacggatgatattaaaattgaaggtttccaaaaagaaaatgcttgttctacatcattaactccatggatcgatttcactaagatttttggaaaaataaatgaatctaactatgatttcattgaaaagattatttatgatgtaactgtatttgaagataagaaaatcttgagaagaagattaaaaaaagaatatgacttagatgaagaaaagattaagaagattcttaaattaaaatatagtggatggtcaagattatctaagaaattgttatcaggaatcaagacaaaatataaagatagtacaagaacaccagaaacagttttagaagtaatggaacgcacaaatatgaatttgatgcaggttatcaatgatgagaaacttggcttcaagaagactattgatgatgcaaacagtacaagtgtatctggtaaattcagctatgctgaagttcaggagttagcaggttcacctgccattaagagaggtatttggcaagccttattgattgtagatgaaattaagaagattatgaaacatgagcctgctcatgtgtatattgaatttgcaagaaatgaagatgaaaaagaaagaaaagattcatttgttaatcagatgttgaagctttataaagattatgattttgaagatgaaacagagaaagaagcaaataaacatcttaaaggtgaagatgcaaaatctaagataagatcggaaagattaaagctttattatactcagatggggaaatgtatgtatacaggtaaatcattggatattgatagattagatacatatcaagtggatcatattgtacctcagtctttattaaaggatgatagtattgataataaggttttagtattatcaagtgaaaatcaaagaaaattagatgatttggttattccttcaagtataagaaataagatgtatggattctgggaaaaattatttaataataagattataagtcctaagaagttctattcattaattaagacagaatttaatgaaaaggatcaagaacgttttattaatagacagattgtagagacaagacagattactaaacatgttgctcagattattgataatcattatgagaatacaaaagttgttacagtaagagctgatttatctcatcaatttagagaacgttatcatatctataagaatagagatattaatgatttccatcatgcacatgatgcatatattgcgacaattctaggaacttatattggtcatagatttgaatcattggatgctaaatatatttatggtgagtataagagaatatttagaaatcagaagaataagggtaaagaaatgaagaaaaacaatgatggatttatccttaatagtatgagaaatatctatgcagataaggatacaggagaaatcgtttgggatcctaattatattgatagaattaagaagtgtttctattataaagattgttttgtgacaaagaagttagaagaaaataatggtacattctttaatgttacggttttacctaatgatactaattcagataaagacaatacattggctactgtacctgttaataagtatcgtagtaatgtgaataaatatggtggttttagtggtgtaaattcatttattgttgcaattaagggtaaaaagaagaagggtaagaaggtaatagaggttaataagcttactggtatacctctaatgtataagaatgcagatgaagaaataaagattaactatcttaagcaagcagaagacttagaagaagtacaaattggtaaagaaattctaaagaatcagcttattgagaaagatggtggattatattatattgttgcgcctactgaaattattaatgcaaaacaattaatattaaatgaatcacagactaaattagtttgtgagatatataaagcaatgaaatataagaattacgataatcttgatagtgagaagataattgatttgtatagattgctaattaacaagatggaactatattatccggaatatagaaaacaattagtaaagaaattcgaagatagatatgaacaattaaaagtgatttctattgaagaaaagtgtaatataattaaacaaattttagctactttgcattgtaattcttctattggaaaaataatgtattctgactttaaaattagtacgacgataggacgtttaaatggtagaacaatttcattagatgatatttccttcatcgcagagtctccgacaggaatgtattcaaagaaatataagttatga

SEQ ID NO: 298 - DNA, 4059 bp, Lactobacillus agilis DSM 20509
atgtctgaaaaagagtaccatttaggtcttgatattggaactaacagtataggttatgcagtgatggattgcaattatcatttaatgagagcaaagggtaaaacattaattggtacaagcttatttagagagggaaacacggcagcagagcggagaggatatcgaacgacacaaagacgtttaaaacgtcgtaagagaaggttaaaacttttagaagctttttttgatccttacatttttgaagtagacgagaacttcttagcgcgtctccatgaagctgatatttcgcctaaggatgaaaataaacgcttttggggctccttgctttttccaaatgaaaaggatgctaatttctataggaagtatccgacaatttatcatttgcgaaaggctttgatggaagaagataggaaattcgatgtaagggcaatatttttggcaattcatcatattatgaagtatcgtggtaatttccttagcccattatcggtagatagttttaagcaagaaggtttagaattaaaagaacaactagacaggcaattaaaacgagtggcagagttatacaacgaattaaatacggatgtcaaaattaatgtgagtgatgtcgaaactattcaagatattataattgataagaataaaagtaggcgtgacaaagctggagcacttaaaaagttactagcagtttcaagtgaccgtaaagaaattaataagctgaatgcttcacttgctaaggaattaagtaatgctatcttaggtatgaaagcccagtttgctaatttattgttagctgatgatttagaaatagacaaaaataagaaaaacttttcgctattggatactaatgccgaagaaaatgtcagtggattgttagaattagtcaatgaaaaacaagctgaattgtttgatgcaataaagacaattcatgatcaaattattctaaatgaaattgttccagacgggaagagtatttcgcaatcaatggtagataaatatgaggcgcatagggagcaattacaagtattaaaggctttgtacgaaaagatggatgctaagcaaatcaaagctataaagaaagcatatagtttgtatattgatgggaaggatccaaaagctaagaaagtagataagcgtgcacaccaaaatagggctgatttttataaagaggtaaagaaagtcttagttgagttagacgattcacgggctgaaaagttacttggtttaattgaaatgggacaattcttacctaaacaaagaacagcaatgaatggggttattcctaatcaattacaccaagtggaattagataagattattgaaatgcagtccaaatactacccttggttagctgagaagaatccagtgaaaagtcatcagaagcgggcgccgtataaattagatgaactgttaacctttagagtcccttactatgtaggtcctatggtgactagtaaaaaacagcaacaaacctctaatagtaattttgcttggatggttagaaaacaagaaggggagataactccttggaactttgaagaaaaggttgatacaattgcatctgcaaatgacttcatcaagcgaatgaccgccaaggatacttatctggttggcgaagatgttttaccagctaatagcctactatatcaacgttataaagttcttaacgagcttaacaatattaaggttaatggaagacgactaccagttgaattaaaacgagaagcatatgttgctttatttgaaaacggagatagtaaaacagtttcagctaaatgttttaaaaattggttgaacgttaaactgaaaaacttgaattcccttaaattagagggcctaagtactgggactaagtttgataataatttatccacttatcatgatttaaagaagatatttggtaaggcagtagatgatgctggcagacaaaaagattttgaacagattatagagtggcttacaatttttgaagataagaaaatcttaagaattaaactgaaagagattgagtggctgacggaagaaaatattacacaactaacccgacttaattataatggttggggaagactttcaagaagattattaactggaatttgtgatagtaatggtcaaagaattatggattggttgtgggacactactaataattttatgcaaattcagtctcaaccagattttcaaaaagccatcgtcgaatataatagtgataaattagagcaaggagatattgaacagattcttggtgaagcatatacatctccacaaaataaaaaagcaattcgtaaggttattaaggttgtccaagatgtagagaaggctatgggagctaaacctacatccatttccatcgaatttacaagaagcgatgggcgctcagaattgactaattcacgaatgacacaacttcaaaaaactttgatgagtctttctgaagaaatgacggaccaagctttgctagctgagtttaaagattttcaagcaagtaagaagaaactaacgaacaagtattatctatatttcactcaattaggtcgagatatgtacacgggggaaccgcttaatattgaccagttgagtttatatagtgatggcgatcatatcttaccacggtcttttattaaggatgattctttagacaaccgagtattgacaaaacgtgcggttaataatgagaaatcagatacggtacctgtttgtgaatatggtgctaaaatgaaggatttctggaatgatttatatgataacggactaattagtaaacaaaaactggctaacttgcttactgatccggacgagattggcccatataaggctaatggctttattcggagacaattagtggaaacttcgcaagttattaaattgtctgctgaaatactgcagacattgtatcaagatacaaaaatcatagaagttcgtcaaaagtatacacatgaactacgtgaacatttcaattttgtgaagattagacaactcaacgattatcaccacgcttttgatgcttatttaacggcgtttagtggacgatacttatatcaacgatatcctaagttacgtggttatttcgtttatggcgattacaataaatttgatgccaaaaaagaccgtaattacctaaaatcatacaatttcttgtatgatttagaagaaggaaagaccgaccaaatagttgataatgtcgaacataaggtattcatgaatcgtcaagacgcaattaatcaactgaaaaaagcatatgaatataaatatatgctagtatcgcaagaaacctatacaaacagtggagctatgtttaaggagactatctacccggtaaatccaaaacagaagttaattcaaaagaaaaacgataagccggttgacatttatgggggatattctaataactacgatgcttacctttccatagtacgattggaagataagaaaggtatcaaatttagggtggtaggaattccgatgagaaacaaggcggaattggataatcttgccaaagaggaccacaatggatatatgcaacgattaaatgagattgttgatgagcagataaatagttcaggtaagaaaaagacttttagaattatccttccaaaggttcattttaagcaacttgtagaagatgatagcggtaaatttatgttgggtagtgctgcgtacccatataatgcaaaacaattagttttaagtgtgaaaagtatcgaatctttagctaataaagatgctagtgatagggagttagtagctgtttatgaggaaatattgaacgtagtgaatgataaatttacgttgtatgatgcacgacagtttagaaataaattaacaagtagcaaagataaatttgtagaattaaatacagcagataaagtaacggaattgctagatattttggatgggttacatgctaatcctgttgttaaaaaattgaaaattatcagcgggagtccattcggatttttacaacgtccgtcaggaatagtgttaactgagaacgctaagttaatttatcaatcaccaactggtatttttgaaagagttgtttatttgagagatttatag

SEQ ID NO: 299 - DNA, 3957 bp, Lactobacillus animalis DSM 20602
atgggaagtaatatgctgaaaaaagattatagtattgggttggatattgggacaaactcagtgggacatgctgtagttactgatgattataaagttcctaccaaaaagatgaaagtttttggggatacatctaaaaaaacgatcaagaaaaacatgctgggagttttactgttcaatgaaggacagacggcagctgatacccgtttgaagcgcgggactcgccggcgctatacccggcgaaaaaatcgtttgcgctatttacaagagatctttgcaccagaattggctaaggtcgatcctaatttcttatatcgactagaagaaagttcactggtggctgaagataagaagtatgatgtgtatcctatctttggaaagcgtgaagaagaattactgtatcatgatacatataagacgatctatcacttacgcagtgcactagctaataatgatcaaccagctgatctaagattggtttatttggctttagcacatattatcaagtatcgggggaattttttactggaaggtgaaattgatctaagaactactgatatcaacaaagtatttgcggagttcagtgaaactctaaatgagaatagtgatgaaaatttgggtaaactagatgttgctgatatcttcaaaaataatacattctcaaaaacaaaaaaatctgaagaactgctgaaacttagtggggctaagaaaaatcaactagctcatcaattattcaagatgatggtcggcaatatgggtagcttcaagaaagtgctagggaccgatgaagaacacaaattatcctttggaaaggatacatacgaagatgatttgaatgacttattggctgaagctggtgatcaatatttagatatctttgttgctgctaagaaagtgtatgatgcagctattttggcaagtattttagatgtaaaagatacgcaaacaaagactgttttctcacaagcgatgatcgaacgctatgaagaacatcaaaaagacctaattgaattgaaacgagtctttaaaaaatatcttcctgagaaatgtcatgactttttcagtgaacctaagatcagtggttatgcgggatatattgatggcaaagtaagtgaagaagatttctataagtatactaagaagactttgaaggggatccctgagacagaagagatcttacaaaagatcgatgctaataattatttgcgaaaacaaagaacatttgataatggtgcgatcccgcatcaagtccatttaaaagaactagtggcaatagttgaaaatcaaggtaaatactatcctttcttacgtgaaaataaagataagtttgaaaagatcttaaacttccgaatcccgtattatgttgggcctttagcgcgcggaaacagtaaatttgcatggttgacccgagctggtgaaggaaaaataacaccatataactttgatgaaatgatcgacaaggagacttcagctgaagatttcattaaacacatgacgatcaacgatctatatctaccgactgagccagttttgcctaagcatagtttattatatgagagatacactatctttaatgagttagctggtgtcagatatgtgactgaaaatggtgaggctaagtattttgatgcccaaaccaagcgctcgatctttgaactttttaaattagaccgaaaagtaagtgaaaaaatggttattaagcatctgaaagttgttatgccagccatcaggatccaagctttgaaagggttggacaacggaaaattcaacgcttcttacggaacctataaagatttagttgatatgggtgttgcgccagaacttttaaatgatgaagtaaatagtgaaaagtgggaagatatcatcaagactctaactatctttgaaggacgcaaattgatcaaacgtcgcttagaaaactatcgtgactttttaggcgaagatatattacgtaaattgagtcggaaaaaatatacggggtgggggcgcctttcagctaagctgttggatggtatctatgacaaaaagacacataagacgatcttagattgtttgatgactgaagattacagtcaaaatttcatgcaattgatcaatgatgataactattcattcaaggaaacgatcaaaaatgcccaagtgatcgaaaaagaggaaactttggctaaaactgtacaggaattacctggaagtccagctattaagaaggggatcttacagagtttagagatcgttgatgagatcatcaaagtcatgggatataagcctaaaagtattgtagtcgaaatggcgcgtgaaacccagaaaacgcatgggacacggaaacgtgaagatcgagtgcaacagattgtggaaaacttaaaagatgctaatgaattacctgaaaaattgccaagtaatgctgaattgagtgatgaaagaaagtacttgtattgcttacaaaatggacgtgatatgtataccggggctcctctagactatgaccatttgcagttttatgatgttgaccatattattccgcagagctttttgaaagatgattcaatcgaaaataaggtcttaacgatcaaaaaagaaaatgtccgtaagactaatggtctgccaagtgaagccgtgatccaaaagatgggaagtttctggaaaaaattgttagatgctggagctatgaccaacaaaaaatatgacaatctacggcgtaatcttcatggcggattgaatgaaaaactaaaagaacgttttatcgaacgccaattggtcgaaacacggcagatcactaaatatgtggcacagctcttagaccaacgactaaattatgatggaaatggtgttgaacttgatgaaaaaattgcgatcgttactctaaaagctcagttagcttcgcaatttaggagcgaattcaaactgcgcaaagtaagagcgctcaataatttacatcatgctcacgatgcttatcttaatgctattgtagccaatttgatcatggcaaaatatcccgaattggagccagaatttgtctatggtaagtaccgcaaagctaagtttaaaggtttaggcaaagctacagctaaaaataccttatatgctaacgttttatatttcttaaaagagaatgaagtatatcctttctgggataaagcacgtgatctcccaacgatcaagcgttatttatatcgggcacaagttaataaagttcgcaaagctgaacgccaaatcggtggcttttctgatgaaatgttggtacctaagagtgattcaggtaagctactgccacgaaaagaagggctcgatccagttaaatatggtggctatgccaaagcggtagaaagttatgcggttttgatcactgcagatgaagtcaaaaaaggcaaaacaaagaaagtgaaaactttagtaaatattccgatcatagatagtaagaaatatgaggctgatccaactgcatatttagctagtcgtgggtatacaaacgtcacaaatagttttattttgcctaagtatagtctgcttgaagatccagaaggtcgtcgtcgttatctagcaagtttcaaggaatttcaaaaagcaaatgaattgatcttgccacagcatctagtagagttgctctattgggtcaatgcaaaagatggagagcaaaaattagaggatcataaagctgaatttaaagaattatttgataagatcatggagtttgcggataagtatgttgttgcacctaaaaattcagaaaagatcagacgcttatacgaagaaaatcaagatgctaccccaatggaattgggtaagaactttgttgagctcttgagatatacagctgatggtgctgcgagcgatttcaaattctttggcgaaaatattccacggaaacgatataattcggcaggaagtttgctcaatggaacattgatctatcagtcaaaaacggggttatatgaaacaaggatcgatctaggtaaattataa

SEQ ID NO: 300 - DNA, 3951 bp, Lactobacillus apodemi DSM 16634
atgcttcaaaaaaattatacgataggtttagatattgggactaattcggtaggttatgcggttatcaatgataattacaaagttccagctaagaaaatgaaagttttggggaacacagataaaaaaacgatcaagaaaaatttaatgggtgttttattgtttgatgcgggtgaaacagcagcaactactcgtttgaagcgtggaacgcgtcgacgttatactcgacgaagaaatcgattgcgctatcttcaagaaattttaggaccagaacttgccaaagttgatgccaactttttgcatcgtttggccgaaagttctctagttacagaagataaggaattttcagcttatcctatttttggtgatcgtgaagaagagttgctgtaccataagacatacaagactatctatcatttacgtagtgctttggctaataaggatgaaaaggcggatctacgcttgatttatttggcattagcacatattatcaagtatcgcggaaattttttgatcgaaggagagattgagctaagtgatactgatatcgataaagtttatgcagatttttgtagatctttcaatgaattattcgatacagaagtccttcaagagatagaagttgaagcgatcttcaaagataaaactctttcaaaaactaaaaaggcggaagaattagttaaagttagtggagtcaagaaaaatcaagtagctcatcaatttttaaaaatgatggtaggtaatactgttaattttaagaaagtgtttaatttaacagaagatcaaaaattatcgtttggaactgactcatacgaagatgaattaaatgatttacttgctaaaagtgatgatagatatttagatgtttttgtagctgctaaaaaagtttatgatactgctatcttagccaatatcttaaacacaaaaaattctgttgctactaaaacaatattttcacaatcgatgatcgaacgttttaaggatcatcaaaaagatttaaaagaactaaagcaattgttcaaaacgtatttacctgaaaagtacccggacttctttggaaactcaaaagaagatggttatgctgggtatattgaaggtaaaacaaatgaggaaaaattttatacacataccaaaaaaatactaaaaaatattcctcaggctgcatcggtcttagcccaaattgatgttggaaactacttaagaaagcaacgtacctttgataatggtgtgatcccacatcagattcagttaaaagagttgttggcgatcatcgaaaatcaaggtaagtactatccatttttactagaaaataaagagaagatcgctaagatcttaacttttagaattccatattatgtcggaccgttagcacgtggtaatagtagatttgcttggctaaaacgagtaggaaaagagaagatcactccatttaactttgaaaacgtcgttgatctagagagctctgccgagagatttattgagcgaatgacacttaatgatctatatttacctgaagaaaaggttttacctaaacatagtatgttatatgaaaagtttagtatttttaatgaattagcgggaattcgttatattactgacaatggtgaaatgaaatttttagatgcgcaaactaaacaaagtatttttgaactctttaaacaagagcggactgttaaggagaaaaaggttttagacctgttaaaaactttaatgccttcagagcgagttgttgcgataaaaggaattgataacggtaaattcaatgcttcttttggcacatatcatgatctgtcaaagatgggctttaagactgaaaaaatagccagtgagagtaaccaagctcgttgggaagaaatcataaaaactttaaccatttttgaggatcgaaagctgatcaagtcacgattaagaaaatacgacgattttttgaatgaaaaagagatcggagctttgagtaagcgtaaatatactggttggggacgcttatcagctaaattgatcgatgggatctatgataaaaaaacacatcagacgatcttagattttttgatgaacgaagactacaatcaaaactttatgcaattgatcagtaatgataattattcatttaaaaaaattattgaggattcacaagtgatcaaagaagaggggagtttgactgaagtaattcaagaactacctggtagtccagcgatcaaaaaagggatcttacaaagtatcgagatcgtagatgaattagttaaagtcatgggcggtaatcctaaaaagatcgtagttgaaatggcacgtgaaacacaaaagacccatgggacaacgcgaagagaagcacgaattaaggaaattatcaaaaatttaaataaattgaaattaaatgaattacctaaagatcttccaagtaatgaagagctaagtgatgagaaagtatatctttattgcctacaaaatgggcgtgatatgtatactggagcaccattagatcttgataatctcagtcagtatgaagttgatcatattattcctcaaagtttcttaaaagatgattcgatcgaaaataaggtcttaactgctaaaatcgaaaatagccgtaaaaccaatggacttccgagcgtagagatagctaagaaaatgggcgcgttttggcgtagtcttttaaaagttggggcgatctcagaaaagaaatatcgtaatctccgtcggagtctgcatggtggcatgacagaaaaattaaaagaaacatttgttaaacgccaattagtagaaacccgtcagatcacgaagtatgttgcgcaaattttaaatagtcgctttaatgaagaaaaaaatgaagataaagtagcgatcgtaactttaaaagcacaattaacttcacaattcagaaaagattttgaattatataaagtaagagagatcaataatttgcatcatgcacatgatgcttatcttaatgcagttcttgccactttacttatgactagtttccctgaattagaaccagaatttgtttacggtaaatatcgaaagacgaagttcaagggccttggtaaggctactgccaaaaataatttatacaccaatattttacagctattaaaagaagagtccgcacaatattgggatactaaagaacgtgatctagcaacgatcaagaaaaacgtatatcaagctcaggtcaataaggttcgaaaagttgagcgccaaacaggatccttttacgacgaaacggtagctaaaaaatctgcctcacaaaagttgtttccccgtaaaaatggtctagatccagtaaagtatggtggctaccagcgagcaaatgaaggatattccttactatttcgagctgatatgctcaataaacgtggaaaaacaaaaagtgtaaaaacattggtaaaaattccaattattgaaagtgcgcaatatttggccgatcctactgagtatttagctaaacgtggatattataatgtttctgaacatagtttgctattacctaagtttagtttattggaaaataataatgggctgagaagatatttagcttccagtaacgaatttcaaaaggcaaatgaacttattttaccaaagcatctagttagattattgtattggagtcagtctaagcagagaaaagaagaactaaacaagcatcgtgctgaatttgcagaattgttcacatatattatggattttgctgataaatatgttgttgcccctaaaaattctgaaaaaatcaagaatatttatgagaataataaagattcttcggtagaagtactagggaagaattttattgaattgctaaagtatacagctgatggtgctgcaagtgactttactttctttgatactaaaattccacgtaaacgttataattcagcgggtgatctattagatggaacattgatctatcaatctaaaacaggtttatatgagactcggatcgatttgggggcgatctga

SEQ ID NO: 301 - DNA, 4134 bp, Lactobacillus brevis subsp gravensis ATCC 27305
gtggaaagtaatcatgatggggaacaagttaagtacacattgggattagacattgggacatcatcaattggctatgccgcaattgataagcatcaaaaacccattcgggcaaaagggaaacatgtcattggcgttcgactctttcaagagggtcaaacggcggctgataggcgggcatttcggacaacacgtcgacgactgaaacgccgcaagtggcgattgaatttactgaatcgactatttgatccttacttatcagaagttgatccaaacttcctgccacgactgaggcaatccaacctttcacccaaagatgacaataagcattttaatggatcaacgttatttcccgataaaacagatgcggcgttttatcgacagtatccaaccatgtatcatttgcgatatgctttaatgaccgagaagcgcaagtttgatattcgagaagtctatctagctattcatcatattgtgaagtatcgaggaaattttctgaattcagcaactgttgattcatttaaaacatcaaatattgattttaccagtcaatttgatcgtctaaatgagctgtacaggcaagttattctggatgagccatttcaaattaatatggatcaagttgatgagatgaccaataagcttttggataacgacgctttgaaacttgatactcaaaagcaggtcgcaaagttattgcctgtgatttataatgacaagccaattgataagcaatataccaggattgcaactgaattttccaaagctattcttggatataagacaaaactggacgtcattttaaacttagatactcaaaatgctaaggattgggtaattcggttggatgatgaagacattgatgacaagttgcctgcactcgtggagaacttggacgaatcccgccaggaaatagtgacgattattcgcgacttgtatgctcaaattacgttgaacgcaattgttcccaaaggaaagtcgttgtccgaatcaatggtggataaatataatgaccataaagaccatttagatttactgatgggattgattcatgaattgggggatgattcagccaaagggattaagttgagggaagcttatacacaatacgttggcaagtctgatgataaaacactgaatcaggatgatttttacgcagcaattaaaaagaatttggacgaagattccaaacgttctccaaaaattcagcgtcttattgaacaggcaagttttatgcccaagcagcggacatcggccaatggcgttatccctcaccagttgcatcaattggaattggaccgaattattgaaaaccaggggcgctattatccattcttaaaaaaaccgaacccaaacactcataaaccaaatggtggcaagtacaaattagatgaattggttgcttttcggattccatactacgtgggaccgcttatcacaaagcgggaccaagaaaaaacttcaggtgcagactttgcctggatgatacgtaaacccggacaagagggagaaattacaccttggaattttgatcaaaaggtagatcgaatggcttccgcgaataggtttattcgcagaatgacaaccaaggacagctatctggtagctgaagatgttttaccagatgccagtctgatttacgaaaagttcaaagctttgaatgaattaaatatgcttaaagtaaacgatagtcgacttagtccaagtcagaagcaggatctttttaacaatctatttaaaaagcaaaagactattcgaacaaaaaaactgcagacatatatccgaacaaattgggagttaccctctgtgatgatttccggtctggctgatccggataaattcaattcaagcttatcaacgtatattgattttcgggatatttttggagaaaaggtcgatgatccaaatcgtcaggcagactatgaagaaattatcgaatggtcaacggtttttgaagatagaaaaatctaccaggcaaagctgaatcagttggattggctgacagagccacagagaaaagcattattaacaaagcgctacacgggttgggggcgactatccaagaaacttttgacaggcttaaaagatcagaatggcgattcgattctggaccagctttggaaaacaaacgataactttatgcaaattcaatccagagatgagtttgccaaacaaattcatgacgagaatgccaagcagttccacgaggcaaataatgttgatgatattttggatgatgcatttacttcaccccaaaataaaaaggctattcgtcaagtagataaagtggttcaagatgttgtcaaggcggttgggtatgcaccggataaaattgcgattgaatttacaaggtcacttgaaaataatccgcaacggacggtttcacgtcaacgtcagctacaagcagcgtataagaatatacctagagaaatcatgaaatcgggattaatggcagagcttggatcggttgctgacagtaaaaaagtgctttctgataagctttatttatattttactcaaatgggtaaagatatgtatgaagacaagacaattaatattgataatttacccaattatgatattgatcacattcttccacaggcatttattaaagatgattcgattgacaatagggtactcattagtaaagaagaaaatgcaaggaagtccaatcgagtaccgcttaaattctttggcgcaaaaagaatgggcttttggaaagatcttttgaataatggcttgattagtaaccgcaaatttcagaacttgactaccgatcctgagaagattagtaaatatagcgcaaaagggtttattcatcggcaattagttgaaaccagtcaggttattcgattagtggctaatatcttaggaaatgaatatagtcaagccggtacaactattattgaagtgagtgctaaaatgaatcgtcaattgcgcgaagactttcacttgattaagaatcggaatgtgaatgattatcatcatgcaatggatgcatatttgactgcgtatgttggggattatttatatctccgttatcccaagttaaggccatattttgtctatggtgattttaagaaagcagaggatcaagatctcaatattagaaatttcaatttcttacatgatttgaaagataatgaaagcttggataaaattgttgattcagaaaccggcgaaattgtttgggagaagcacgggtcagttaagcaattaaaaaaggtttatcattataaattcatgttggtttcccaagaagtttatacaaggcaggatgcattgtttaaccaaacgatttatccggcttcagatgccgataaacgaaagttaatcccgattaagaatagcaaaccggtcgatgtctatggcggttatagcggaaatatagatgcctatatggcaattgttcgtgttcatggtaaaaaagaagataattacaaagtggtcgggataccgatgcgagctgtaactaagcttaaaaaggctgagaaggaaggccatgatagttaccttaatgctgttcatgaggttctaaagccccagttcaccaagaaaaagaaaaatcgcaagaccggtgaaattactgagacagtggatgaatttgatgtactcctcggaaaagtttattatcgacaacttattgttgacggcaataagaaatttatgctgggaagttcatcttaccagtacaacgccaaacagcttgttttatcggataaagcgatgcaggttttgagtaagaatggtaaggtgaaaagccaggatgaaaatcaaaatctaattgatgtttatgacgagattttggaaaaggttgatcaatattttgaactgtatgatcaaaggcattatcgagaatcgcttcataaaggaagaggcatttttgtgaatctgccactcagcaaccaatatgatggcagtaagttaactagttatggtaagtatgaaacaattgacgcaattttgaatgggttacatgcgaatgcaacaatgtcaaatttaagatatctaggtatttcttcaccatttggaaaaatgcaagcttcaaatggattaaccattgatcctgattcgattatttgctatcagtcaccaacggggctatttgaaagacaaattaaacttagcgatctttaa

SEQ ID NO: 302 - DNA, 4116 bp, Lactobacillus buchneri CD034
atgaaagttaataattatcatataggtctcgatattgggacctcatcaattggttgggtcgcaattggcaaagacggaaaaccgctgcgtgttaaagggaagacagcgattggcgcccggttgtttcaggaaggcaaccccgctgccgaccgcaggatgtttcgaaccactcgacggcgtctgagtcgacggaagtggcgattgaagttattggaggaaatatttgacccatatattacacctgtcgattccacgtttttcgccaggttgaaacaatccaatttgtcaccaaaagattcacgcaaagaattcaagggttccatgcttttcccggatttgaccgacatgcagtaccacaaaaattatccaaccatttatcatttacgtcatgcattaatgacgcaagataaaaaatttgatattcggatggtttacttggccattcaccacattgtgaaatatcgcggcaatttcttaaactctacaccagtagattcctttaaggcatcgaaggttgattttgttgaccaatttaaaaagttaaacgagttatatgccgcaattaatcctgaagagtcatttaaaattaatcttgcaaatagcgaagatattggccaccagttcctcgatccatcaattcgtaaatttgacaagaaaaagcaaattccaaagattgttcctgtcatgatgaatgataaagtaacggacagacttaatggtaaaatcgcgtcagaaattattcatgctattttaggctataaagcaaaacttgatgttgtcctacagtgcaccccagttgattccaaaccatgggcacttaaattcgatgatgaggacattgatgccaaacttgaaaagattttacctgaaatggacgaaaatcaacaatcaattgttgctatcctacagaacttatattctcaagtaactttgaatcaaattgttcctaatggcatgtcattatcagaatcaatgatcgaaaagtacaatgatcatcatgaccacttgaagttgtataaaaagctaattgatcaactcgctgatccgaagaagaaagccgtcttaaagaaggcatatagtcaatacgtgggtgacgatggtaaagtcatcgaacaagccgagttctggtcaagcgtgaagaaaaatttggatgattccgagctctcaaagcaaattatggatctgatcgatgcagaaaaatttatgccaaagcaacgaacatcgcaaaatggggtgattcctcatcaactgcaccaaagagaacttgatgaaatcattgaacatcaaagcaaatattacccatggcttgtcgagatcaatcccaataagcacgatctccaccttgcaaaatacaagattgaacaattggttgcttttagggttccatattatgttgggccaatgataacgccaaaagaccaggctgaatcagcagagactgttttttcttggatggagcgtaagggtacagaaactgggcagattaccccttggaattttgatgaaaaggttgaccggaaggcatccgcaaacagattcatcaagcgaatgaccaccaaagatacttatttaattggtgaggatgttcttccagatgaaagcttattatatgagaagtttaaagtcctcaatgagttgaacatggtccgggttaacggcaaattattgaaggttgctgataaacaagcgatattccaagatcttttcgaaaactacaagcatgtctcggtcaagaagctgcaaaattacattaaagccaaaacaggattacccagtgatccggagatttcaggtttatcagaccctgagcatttcaacaattctttgggaacatacaatgatttcaagaaattatttggtagtaaggttgacgaaccagatcttcaagatgattttgagaagattgttgaatggtcaactgtatttgaggacaaaaaaatcctgcgggaaaagcttaacgaaattacctggttatctgatcagcaaaaagatgttttagaatccagtcgttaccaaggttggggccggctttccaagaaactgttaactggaattgtcaatgaccaaggcgaacgaatcattgacaaactttggaataccaataaaaatttcatgcaaattcagtctgatgatgattttgccaaacggattcacgaagcgaatgctgaccaaatgcaggcagtcgacgtggaagatgtgttggcagatgcgtacacttctccacaaaataagaaggccatccgccaagtggttaaagtcgttgatgatatccaaaaggccatgggcggagttgcgcctaagtatatttctattgagtttacccgttcagaggaccgtaatccacgtcggacaatttcacgacaacggcaacttgaaaataccttaaaagatactgctaaatctttggctaaatcaatcaatcccgagttactttctgaactggacaatgcagcaaagtctaagaagggcctgactgatcggttgtacttgtacttcacgcaacttgggaaggatatctacactggagagccaatcaacattgatgaacttaataaatatgacattgatcatattttgccacaggcatttattaaagataattcactggataaccgtgtactagttttaacggcggttaacaatggtaaatcggataacgttcctctaagaatgtttggtgccaagatggggcacttctggaaacagcttgctgaagcaggcttgattagtaagcgcaaactcaagaaccttcaaacagatcccgataccattagtaagtatgcgatgcatggattcattcgtcgacagttggttgaaaccagccaagttatcaaactggtcgcgaacattttgggagacaagtatcgcaatgatgataccaagattattgaaattactgcccggatgaaccatcagatgagagatgagtttgggtttatcaagaatcgtgagatcaatgactatcatcatgcgtttgacgcctacttaacagcctttttaggtagatatttgtaccatcgatacatcaagcttcgtccatacttcgtctatggtgatttcaagaagtttagagaagataaagtcactatgcgaaattttaattttctccatgatttaactgatgatactcaagaaaagatcgctgatgctgagactggtgaagtaatatgggaccgcgaaaattcaattcagcagttaaaggatgtttaccattataaattcatgctgatttcacacgaagtttatacgcttcgcggcgcaatgttcaatcaaactgtttatcctgcatcagatgccggcaaacgaaaattgattccggtaaaagctgatcgaccggtcaatgtctatggtggatatagcggcagtgcggatgcgtatatggcaattgtcagaattcataataagaagggcgataaatatagggttgtcggtgttccaatgcgggcactggatcgtttagacgccgcgaaaaacgtcagtgatgcggactttgaccgggctctcaaagatgtattggcaccacagctcacgaagactaagaagagtcggaaaacgggagaaatcacccaagtcattgaagattttgagattgttttaggaaaagtaatgtaccgacaattgatgattgatggtgataagaagttcatgcttggaagctcaacctatcaatataacgccaagcaattggtcctctccgatcaatctgtcaagacacttgcaagcaaaggaagattagatcctctgcaagaaagtatggattacaataacgtctacactgagattttagacaaggttaatcagtatttttctttatatgatatgaataaatttcgtcacaagttgaatcttggtttcagcaaatttatctcatttcctaaccataatgtccttgatgggaatactaaggtgtcttctggcaaacgggagatcttgcaagaaatattgaatgggctacatgcaaatccaacattcgggaatttgaaggatgtcggcatcacaacgccatttggtcaattacaacagcctaatggaattctgctgtcagatgaaacaaagattcgttatcagtcaccaacaggcttattcgaaagaaccgtcagtctgaaggacttataa

SEQ ID NO: 303 - DNA, 4149 bp, Lactobacillus buchneri DSM 20057
attgaggggattaaagtggaaagtaatcatgatggagaacaagttaagtacacattgggattagacattgggacatcatcaattggctatgccgcaattgataagcatcaaaaacccattcgggcaaaagggaagcatgtcattggcgttcgactctttcaagaggggaaaacggcggctgataggcgggcatttcggacaacacgtcgacgactgaaacgccgcaagtggcgattgaatttactgaatcgactatttgatccttacttatcagaagttgatccaaacttcctgccacgattgaagtaatccaacctttcacccaaagatgacaataagcattttgatggatcaacgctgtttcccgataaaacagatgcggcgttttatcgacagtatccaaccatgtatcatttgcgatatgccttaatgaccgagaagcgcaagtttgatattcgtgaagtctacctggctattcatcatattgtgaagtatcgagggaatttcctgaattcggcaactgttgattcatttaaaacatcaaacattgatttcaccagtcaatttgatcgtctaaatgagctttacaggcaagttattctggaagagccatttcaaattaatatgaatcaagttgataagatgaccaacaagcttttggataatgacgctttgaaactggatactcagaagcaggtcgcaaagttattgccggtgatttataatgacaaacctgttgataagcaatataccaggcttgcaactgaattctccaaagctattcttggatataagacaaaactggacgtcattttaaacctggatactcaaaatgcaaaggattgggcaattcggttagatgatgaagatattgatgataagttgcctgcgctcgtggagaacttggacgaatcccgccaggaaatagtgacgattattcgcgacttgtatgctcaaattacattgaacgcaattgttcctaaaggaaaatcgttgtctgaatcaatggtggataaatataatgaccacaaagaccatttggatttgctgatggggttgattcatgaattgggggatgattctgccaaagggattaagttgagggaagcttatacgcaatacgttggcaaatctggtgataaaacgctgaatcaggatgacttttatgctgcaattaaaaagaatttggacgaagattctaaacgttctccaaaaattcagcgtcttattgaacaggcaagttttatgcccaaacagcggacatcggccaatggcgttatccctcaccagttgcatcaattggaattggaccgaattattgaaaaccaggggcgctattatccattcttaaaagaaccgaactcaaacactcataaaccaaatggtggtaagtacaaattagatgaactggttgcctttcgaattccatactatgtgggaccacttatcacgaagcaggatcaagaaaaaacttcaggcgcagactttgcttggatgatacgtaaacccggacaagggggagaaattacgccgtggaactttgatcaagaggtggatcgaatggcttctgcgaatacgtttattcgcagaatgacaaccaaggacagctatctggtagctgaagatgttttaccggattccagtctgatttacgaaaagttcaaagttttgaatgagttaaatatgcttaaagtaaacgatagacgacttagtataagccagaagcaggatctttttaacaatctatttaaaaagcaaaagactattcgaacaaagaaactgcagacctatatccgaacaaagtgggagttgccgtctgtgatgatttccggtctatccgatccggataaattcaattcaagtttagcaacgtatattgattttcgtgatgtttttggagaaaaggtcgatgatccaaatcgtcaagcagactatgaaaagattatcgaatggtcaacggtttttgaagacagaaaaatctaccaggcaaagctgaatcagttggattggttgacggagtcgcagagtaaagcattattaacaaaacattacacgggttggggccgattatccaagaagcttttgacaggtttaaaagatcagaatggcgattcaattctggaccaactttggaaaacaaacgataactttatgcagattcaatccagagatgagtttgccaaacaaattcatgatgagaatgccaagcagttccacgaggcaaacaatgttgatgatattttggatgatgcatttacttcaccccaaaataaaaaggctattcgtcaagtagataaagtggttcaagatgttgtcaaggcggttgggtatgcaccggataaaattgcgattgaatttacgaggtcacctcaagatcggcctcaacgaacattttccaggcagcgacagctccagagtacctatttaaatgtcgccaaagcgttgatgaaatctaatttgaaccaagaactcaaatcagtgatcgatagccagcaaacactaacggataagctttatctgtacttcacgcagcttggtcaggatatgtatacaggcaaagaaattaactttgatgaacttgttaattatcaaatcgatcatattctgcctcaagcctttattaaagatgattcattagataatcgggtattggtcagtgcaccgattaataatgcaaagtctgacaatgttccggtaaagaaatttggtgccaagatgggttacttctggaagcagttggcagaaaatcatctcatcagcaagcgcaaactaaataatttgacaacagatccagataagattggtaagtttactgctcagggcttcattcatcgtcagttggttgaaacgagtcaggttattcgattggtagccaacattttgggaaatgaatatggccatgatggcacgacaattattgaagtgaccgcaaagatgaatcatcaaatgcgaaaggattttgacttaatcaagattcgggatgtaaacgattatcatcatgcaatggatgcgtacctgactgcgtatgtgggtgattacttatatctacgctatcccaaattacgttcttattttgtctacggtgattttaagaagcttaaagatcagagcttgaagattagaaactttaattttctgcatgatcttacaaacgatgaagctggtgataagattgtcgatcaagaaacaggcgagattatctgggataagcacgagtcagttaagcaattaaaaaaggtttatcattataaattcatgttggtttcccaagaagtttatacaagacaggatgcgctgttcaaccaaacgatttatccggcttcagatgccgataaacgaaagttaatcccgattaagaataacaagccggtcgatgtctatggcggctatagtggaaatgtagatgcctatatggcgattgttcgtattcatggtaaaaaagaagataagtacaaagtggtcggggtaccgatgcgagctgttgccgaccttaaaaaggctgaaagcaaaggtcgtgataattaccttaacgctgttcatgaggttttaaagcctcaattcactaagaaaaagaaagatcgtaagactggtgaaattactgagatgatggatgattttgacgtactcctcggaaaagtttattatcgacagcttattgttgacggcaataagaaatttatgcttggaagctcaacttatcagtacaacgccaaacagcttgttttatcggataaagcgatgcaggttttgagtaaggatgacaaactgaaaaatcaggatgaaaatcaaaatctaattgatgtttatgatgagatcttggagaaggttgatcaatattttgaattatatgatattaacaaatttcgtcagaaacttcatgacggacgaaagaagtttattgaattaccagtagacaacgattttaatgggaaaaagcttatttcatacgggaaaagagcaactatcatttcaattctaaatgggcttcatgcgaatgctaccatgtctaatttaaaatatttaggaatttcttctccttttggtatgcttcaagttccaaatggcataatcttaagcccagcatcaaggatttgttatcaatcgccaacaggattattcgaaagaaaagttaagcttagcgatctttag

SEQ ID NO: 304 - DNA, 3516 bp, Lactobacillus cacaonum DSM 21116
atggctaaatatagtgtggggttagatattggaatttcttcagttggttgggcaattattgatattgagacaaaacaaattgtgaatcttggaagtagaatttttccatctggaaatgcggcaggaaatcaagaaagacgcggttttcgtgggataagacgattgattagacgtcgcaagaatagattaacagatttaaagaaattattgggagaaacatttttctctgatttaaaaaaaattgattcaaatggttatgaatattatgatatcgatttccaaattaacgctaatccttatgaattacgagttaaaggaataacggagaaactatctaaaaaagagttagcagttgtattacatcatatcattaagcatcgtggtatttcttatgacttaggagatttggaagatgatgggacaagcggagttagcgattataaaaattcaatcaatattaatagacaattacttcgtgaaaaaacggttggtcaaattcagttagaaagactcattgagtttaaccaggtccatggacaagttaaaaaggctgaagatgtttcattgttgaatgtttttccatcttctgcatatcgtgatgaagcaaataaaatcatgattaagcaacaagaattttattctgaaattacgaattcattcatggaacaagtggatcaattagttagccgcaaaagagattattttattggaccaggtaatgagaaatcacgtactgattatggaatatataaaagtgatggacgaacattagataatttgtttgctgaactcattggaacggataagattaatggtgaaaaaagagcatcagcatcaagtttgactgcacaggtttacaatttattaaatgatttaaataatttgcatgtttctaatacagaagatggcaaattaacaacaagcacaaaaaaagaaataatcaaagcagctaaaactacagatggagtttttggaatatcccaaatttgtaaaattattggttgcaaaaaagaggaaattactggatttagacaagataagtctgaaaaaaaagttattcatacattagcaggatatcgaaaaattaggaaagctttggcaactataaatattgaggcgaatgagttaaatccaactgtttttgaccaaattgccgatattttaactcttaatacggaaaaagcagaaatccgaaaacagttagacaaagtccagttagatataactgatgagatgaaagaactagttattgataagaataaagattttttagtagatgggcgagctacatggcatagtttttcctatcaaacattaaacatgcttattcctgaattattgaatactagtgaagagcaaatgacaatattaactcggatggggttaatgaaatcagataatgagaaataccgcggattgaaaaagatacctgctgaaaaaattgcatcagaaatatttaatccggttgttgcaaagtcaacaagagaagcaatcaaagttttcaatgcaatatctaaagagataggaaaaaataatattgagcatgttgttattgaattgcctcgtgatgataatgaagaagatgaaaaaaggaaaattcaaaagctacaaaaagctaatgagactgaaaaagaggctgctgataatctagtaaagcataaactaggaatttcggattcagcattaattgcacattaccgtaagtttaaaggactttcgcaaaaggttaggtattggtatcaacaagaaacttattgtccatattgtgggaaaataatcgaagcaacacaactaattaataataacgataattttgaagttgatcatattattccaatttccgttagttatgatgattcacaaaataataaagtgctagttcatagccaatgtaatcaagctaaagaaaaacaaactcctttgggttggataaataatggtggtggttttggtcaaagcaagaatgaatatactaatagggttaaaaataataagaagtattcaaaaaacaaagttgataatttgttaaatgagacagatcttactgatattattacgcaacgtagttttattcagagaaatcttaatgatacgagatatgctgcacggacagtattagatgagttttattcattttttaaatcaaatgatttaccgacaaaggtcaaagttgtacgtggaaaatggacttctcaaatgcgaagaaaatggaataatgttgggggactaaggaaaactcgtgatacacatcatcaccatgcgattgatgccagcattattgcaagtttcccactattgagagctttcgatagagcgataaaattgattgatgtcgataaagaaactggagaaatagtacaatatgggaaggcctctttaaatggggacgtaatcgaggaaaaatcagtgattcaggcacctattataaaaaacgagaagttcgaaaaacttgttgatgaaatctataattttccgttatttaaacaagttgagctggcaaataatattgaaaatccagaaaatccggtgaaatttagtcatcatgtcgataaaaaagcaaatcggacagttgctaatcaaacaatttatagtacacgtattaaaaaaactgaaaaaatagttcgtaaaaaggtaacggctaaagaagaagagtatgttatcggaactattaaagatatttatgatgtaactaactttgaaaaattcaaaaaactttatgatgaatcttctaaaaaagatgatatcaaatttttaatgcagaaaaatgatccaaaaacatgggagaaattagttgaaatcatgaatacctacccagattatgaagaaattagtcagttagatgggaaagttaagcgggttaaagtttcgccatttaaactttattttcgtgaaaatggcttcattactaaatatgctaaacacaataatggcccgaaagtagtaagcataaagtattatgattcaaaacttggaaatcatattgatataacaccagttaatgctaataataaggtaatcttacagagcttgaaaccttggagaactgatgtttattataataatgaaacacaacaatatgaactgcttggtttaaaatattctgatttaaagttcacaaaaggtgtttatggaattactcgagaagcgtatgaaaagcttaagtatggctatacagacggtgtacctgcttggaaaccaatcagcaaagagagtgaattcaagtttagtttgtatagaaatgatcgtgtaagaattattaatgaagccggtgaaaaaatagatctcctatttggttctagaaatgaaacatcagaaggatacgttgaaatgaagccaatttttaagacgaattttgatgatgcagaggaagctagtttttatggaaagacatcaaataagagattaatcaagaaaatggctagaaaagggtaccaaatttataaggtgaatactgatatcttaggtaatctatactataccgcgaaagaatcgaatgaacctaaattagatttatag

SEQ ID NO: 305 - DNA, 4089 bp, Lactobacillus casei str Zhang
atgacaaagttaggtaaaccatatggcattggagtcgatatcggctcaaactcgattggatttgcggctgtggatgagaacagtcatcttattcgattgaagggaaaaacggttattggggcaagactgtttgaagaaggaaaagcagcagcgaaacgccgagcaggtcgtaccactcgccgtcgtttgagccgaaatcgttggcgactcagttttttgcgtgatttttttgaatcgcatattacgcctactgacccgaatttctttatgcggcaaaagtactcggaaatctcgccgaaggataaggcccgttacaagtatgagaagcggctttttaatgatcggacggatgctgagttttatcagcaatattcgacaatgtatcatttgcgcaatcggcttatgactgatccaagcagagcggatgttcgcgagatttattttgccattcatcatattttgaaaagtcgcgggcattttttgacgccgggagatgccaaggatttcaatacaaacgatgtggcgttagacgagatttttcctgcattgcaggatgcctacgcccaagtttacccagatcttggcattacttttgatgaggacaaagagaatgagtttaaaacaattttgctgaatgaaatagcaacgtcaattgatacgcaacgagctttagtcaaactgttactggctgaagaagacgacaaggacatcttgaagcagcagaagcaggttttaaccgagtttgctaaagctgtggtcgggttgaaaaccaaacttaatctagcgttaggaactgaagttgatagttctgaagccactgcttggaacttttcattagggcagcttgacgataaatgggctggcattgaatcggctatgaccgatgaaggaacggaaattctggaccagattcgggatctgtatcgagcccggctccttaatggtattgtgcccacaggaaagacgctttctcaagctaaggttgatgattatacacaacatcatgaagatctccagttgtttaaagcctatttaaaacaacttgaagatgatggaacggctaaagcaatccgacagctttacgatcgctatatagacggtgacgatgctgcgccatttttgcgagaaaattttgttaaagcgttaactaaagacgtgacggctcatccaaacaccaagtctcctgaactgcttgaacgtttggcgcaaccggacttcatgctcaagcagcgcaacaaagcgaacggggctattccagtccaaatgcaacagcgggaattggatcagatcatcaaaaatcaagctgtttattacgactggctggctgcgccaaatccggtggaaaagcatcggaaaagtatgccttatcagttggatgaattgctgaattttcgaattccatattatgttggaccattggtgacggctaaagagcaaaaagcagcacaaggcggggtttttgcttggatggttcggaaagatcctgaaggtaatatcacgccttataattttgacgaaaaggtagatcgcgaagcttcggctaatacctttattcagcggatgaagacgaccgacacttacttgattggtgaagacgtgttgcctaagcaaagtttgctgtatcaacgctatgaggtgttgaatgaactgaataatgttcgtgttaataacgagaagcttagcatcgaacaaaaacaacaagttattcgagaactgtttgaacggcataatagtgtgacaattaaacaatttgccgaaaatctgcgagcgcatggtgattacgcccacattcctgaaattcgtggtttagctgatgagaaacgttttttaagttcactttctacgtaccgtcaactgaaaagtcttttacccgaggcaattgatgatccagccaaacaagccgatattgaaaatatcattgcgtggtcgaccgtttttgaagacgcagcgatctttaaaacgaaattgaaagagatcagttggctcggcagcgaagccatcacgaaactaagcaacattcgatatcgggggtggggccagttttcgcgcaagtttttaaatggtctgacccttggcaacgggcatactatcattcaagaattgctcctgtccactaacaacttgatgcagatactaacagatgaaacgctacaaaagaaaatgaccgagctgaacgctgataaattgaaaacagcgaatatcaatgatgcgattgataatgcgtatacatcaccaagcaataaaaaggcattgcgtcaggttcttcgggttgttgatgatattaaacgcgctgcggatggtcaagatcctagttggttgtacgttgaaaccgcggatggcggtggtacaccaggcaagcgcactcgtgcgcgtcaacatcaacttcaggaaatatacgcgaatgcggcccacgagctgattgatacggcagtccgcggtgaattggaagataagatttcagataaggccgatttcaatgatcgactagtgctgtatttcatgcaaggtgggcgtgatatctacactggtgcgccactaaatattgatcaactaagtagttatgatatcgaccatattctgccacaatcgctaatcaaagataactctttagataatcgtgtattagtgcacgctattatcaaccgagagaaaaacgcaacatttgcatcaaccatctatgctcaaaagatgaacgcgacatggcgtcaatggcatgaggcagggctgattagcggtcgcaaactgcgtaatctgcaaatgcgtccagatcaaatcgataagtacgcgagcggctttgttgcccgacaattggtggaaactcgacaaatcatcaagctgacggaacaaattgtagcagcgcagtaccctgataccaaaattatcgccgttaaagcaggtctttcacatcaattgcgggaagaactcgaattccctaagaatcgtgatgttaatcactaccaccatgcttttgatgccttcctagccgctcggattggtacctatttactcaagcgattccctaatttacaggctttcttcacgtacggcaagtttacaaaagccgacgtcaaaaagcttcgcgggttcaactttatccgtgatatcacacatgctgaagataaaattgtggcaaaggataccggcgaggttgtatgggacaaacaacgggatgttgatgagctggatcgaatctataactttaagcggatgttaattacgcatgaagtccgctttgaaacggcggatttgtttaagcagacggtttatggggccagggattcgaaggaggctggcgggtcgaagcagctcattccaaagaaaaaaggatatccagttgatatttatgggggctatttcagagagaacacggcctatcttgccgttgtgaaagtgaccaaaaagacagagacaatctttaaagttgtcaaaattgcaacttcccaggttgcagctttgaataaagcaagatcacggtcaactgctgaggagctttcagtacttactgaactcctaaagccaaaatttagcaaggtcgggaaaaatggtaagatcactgatacaccattcgaggttgtgcttccgcgagttccgcgtgaacaacttttctataatgcaaagtatggtttctttatggttaactcagataccatgtttcacaatttccaagaaatttgggtgtctcgttcagaccaaaaaattcttcaacaaattagaaaagccaagattgactatcctaatgttgatcaagatttagacaatctttttcacaatttagccgatcaaattgtcaaatattttgatttgtattctattgcagggtttaaagagaaaatcagtcaaagtcaaaatactttcaatgatttggcggttgatgatactgaccagagtgtaggtaagataacggtcattaatgaattgttaaagggagcacaagctaatggcatgacgggaagcctaaaagttttaaagataagtaccccatttggatttacgcaagataaaagtggtgttcttacaaaagatagttccatcatctatcagtcaccaacagggctttttgaacggtctgttcgcctaactgacctgtaa

SEQ ID NO: 306 - DNA, 4188 bp, Lactobacillus ceti DSM 22408
atgagtaaaaaatatcaaaacacaaagtattatgtagggcttgatatcggaacgtcgtctgttgggtgggctgtaacagacgcgaattatgagttattaaaagttaatggtcataagacatggggatcaagattattcacagaggctgaaacggcacttgaacggcgaacacaccgcgctactcggagaagactgcaaagaagaaaacaaagactggatttattagatgaattatttgctgaagaacttgctaaagtagatccacagtttttacttcgtttgaaggaaagtcagtatcatatggaagataaaagtacagatgataagtatgttttgtttaatgatcaaaatagaacagatggagaattttttacagagtatccaacgatttatcatttgcgtagtgaattaatgcaagggaaaaaagaggatatacgtgcagtatatcttgcattacatcatatcgtgaaatatcgtggccacttcttattacctggagataattatgatatgcaaggtaatttaagtgaactgattaagaggctgtttaaatttattgaagaaactttatttattgaagatcttggattgacggatgaaattcaatccaaaatagaagaaattttattgacaaagacaaaaactcgtcttgatcgccaaaaagaaattgtcaaactttttaatacaaaacatcaaaaattagatgataaacaaaaaaaattattagaagctatttttaaattatgtttaggtcttaaaggtaatatggttaatatttttggtgacaaaggtgaatatggaattgattttactgatgtcgaagataagaagaaaaaggtagaatttagtgctgattatgataataacattaatgactatgtagatttctttggtgaatattttgaattgttagaaattacgaaaaaaattaatgatacagttattttttctgaaattttagtcgatggaaaaggtttttctgaatctaaagtaatttcttatgaaaaacatcaacaagatttgcgcaaattaaagacactcttgaagagtctagataaaaccttggggtataaatacggagaaggattataccaaaaaatattacttgatgatgtaaaatctaattatgttaattattcaggaaattctcaaaaattaaaaaaatgtactaaagatgagttttatgggtttatcaagagtaagttaaattcagttaccaagaaagaaaaggtttctgaagctcaacaaaaagaaatcgctcagattctcgctgatatggaatttggtgattatctaccgctgcaacgtacaactgataatggtgttattccaaaccaattacacaaaaaggaattaattgaaattattgaacaacaaactaagtatcatgattttttcaatgatgtagatgaaaatgggctaactattaaagataagattatttcattaatgacttttagaataccttattatgtcggaccattgaatgattatcataaagttgctgatggaacaggacatgcttggattgaaaagaaaaaagacggtaaaatctatccttggaattttgatgagatggttgatacagaggctactgcagaaaaattcattaaaaatttgacgaataaatgcacctatttaaaaggtgaagatgtattgccaaaagaatcgaagctgtattctgaatttatgttattaaatgaacttaataatattaaaatagataatcaaaaattggatcctaaattgaagatgaaaatggtatcagagttgtttatgaaaaaaaacgaaaagataacgaagaaaaaaattgttgattacttacgctcaattggtcaagctaatggtaacgagatggttagtggaattgatcgggaaatcaaatctgatctgaaaactattcataaaattcaacattattaccaagacgcatcgctagaaatggcggaaaatattattcgttggaataccatttttaatgattctacttctgacatattaaaggataaaatcacaaaagcatatggtgatgtattaactcctggtcagattaaaggattgtctaatctagcatgtaaagattgggggaaattatctgaaaaattcttaacaggtattcgttgtgatgtgggagaatttaaaaatattagtattattcaagctatgcgagatactaataataacttgatggaattattatcgaataaatatgaatttatggataagattcaagaatacaataaagaatattatggtgattttaccttcaaagcagaaccctctattatggatgatttatatgtgggacccggtccgaaaagagctatttggcaagcggtacggattgttgaagaaattaagcggattatggggcatgatccagaaaaaatctttcttgaaacaacaagaactaatcgggcaccaaaggttaagaacactaaacgttatgatgcgttagaaaaaaagtatgagtccgttaaagagcacgaatatgcagaagtaaagaaagaatttgaaattgaaaaaaatgatagtttaaatataaagaagttatttctttattttacacaactcggacactgcatgtattctgacgaaaaaattccttataatgaattattcactaatcgttatgatattgatcatatttatccacgaagtaaaacaagagataactctatggacaatctcgtattggtgaaagcagaatgtaatagagataagaaagataattatccaattaagcttaaaacaaatattcaacagaaatgtcaggttcgttgggcatatttacgtgataaaaaacttattactgaagaaaaatataatcgcttagtgcgtaaaacaccattaactgaagatgaattgtcacaatttattgccagacaattagtgtttacatcacaatctgtcaaagcaacagcggaagtatttaaaaggttatatgaagattctaaaatttgttatgttaaagctgagaatgttagtgactttagatatggttcaactagaaaaatgagtaaagatgatcaaccgcaaccttttatcaaaaatcgcgatgtgaatgattttcatcatgcgaaagatgcttatttaaatattgtagtgggtaatgtatatgatgttaaattcacacaaaatccaacgagatttattaaagcaaataaagattatagtttgaattatatttttagatatcctgtgaataaaaaaggtgagaatgtttgggatccagaacaatcgatgaagatagtggaaaaaacattgaaaagcaatgatgtgcgtgtcactaaattagtgaagccaatcactagtccaatatccaacgaaactcttcataaagcattaaaatgtaaacctggttcttatttaccacgtaaatcttctaaaggaacacccttggcagatgtgactaaatatggtggatatgaaaagattaaaaatgcatattacagtatttataaatatacctatatgaagaaaaaagaatgtatggaagagtttctacttgtacctataccaattcatttggtgaataacgatgaagaattaccaaaatatataaacgataagatagccgaaagagcaaaaaagaaaaaattggaaacagtcgagtgtattgtaaaagaattatatcaaggaactttagttagaataaatgggtatgattatcgtattgcaggaagttcgggaaaacaattcgaattgcataatgggattaatctgattgttgaaccttgggttgaaaaagttctgaaagaaacagataaattcgtgcgaaaatctaattcaaaattagataaaaaacaacaaaaagagaatacaactgaaactctgattgaaaaacaattaaatgatgtatttgaatatctctgtcggaaattaaatcaaggcatattcaaaaacaacaaacatacattacctgctaaactgttgggggatagtattcaaaaacgttttgaagatgctagtattgaagatgaatttgaggttataaaagaattgataagtgctatagcgaagaatcctcagaatttcaaaacgattcaaaaagtactagatatatccggcagttcgataccaagatttaatttaaagcttacaaaaaataatgtagacgagtttattattaaaaatgaatcggtgactggtttatttacacatgagaaagttatttttagaaaatag

SEQ ID NO: 307 - DNA, 3360 bp, Lactobacillus coryniformis torquens
atgggctatcgaataggcttagatgtggggattacgtcaactggttatgctgttttgaagactgataaaaatggactaccatataaaattttaacactagactcagtaatttatccgcgtgctgagaatccacaaacaggggcgtcattggcggaaccgcggcggataaaacgaggattgcggcgccgtacgcggcgaaccaaattccgtaagcaacgaacgcagcaattatttatacatagtggcttattgtctaaacctgagattgaacaaatcttagcaacaccacaagctaaatattcagtctatgaacttcgggtagcgggtctcgatcgtcgattaactaatagtgaattattccgcgttttgtacttttttatcggacaccgtggatttaaatccaatcgtaaagccgagttaaatccagaaaatgaagcagataagaaacaaatgggccaacttcttaattcgattgaagaaattagaaaagctattgctgaaaaaggctatcgaacagttggtgagttatatctaaaagatcctaaatataacgatcataaacgtaataaaggctacattgatggctatttaagtacgccaaatcggcaaatgttagttgatgaaattaagcagatcttagataagcagcgcgaattaggcaatgaaaaactaactgatgagttttacgcaacttatttactgggcgatgaaaatcgagctggtatttttcaagcacagagagactttgatgagggacctggtgctggaccttatgccggtgatcaaataaaaaaaatggtgggtaaggatatttttgaacctaccgaggatcgtgcggctaaggcaacctatacttttcaatattttaatttattgcagaaaatgactagtttgaactatcaaaatacaactggagatacttggcatacattaaatggacttgatcgacaggcgattattgatgctgtttttgcaaaagcagagaaaccgactaagacgtataaaccaaccgattttggcgagttacgtaaattattaaaattacccgatgatgcacgttttaatctagttaattacggtagtttgcaaacacagaaggaaattgaaacagtagagaagaaaaccagatttgttgattttaaagcctatcacgatttggtgaaagtattaccagaagaaatgtggcaaagtcgacagctattggatcatattggaacagcattaacgttatattcgagtgataaacggcgccgacgctattttgctgaagagttaaatttaccagctgaattaatcgaaaaactcttaccacttaatttttctaaatttggccatttatcgattaaatcgatgcaaaatattattccctatcttgaaatgggtcaagtttatagtgaggctactactaatacgggatatgatttccgtaaaaaacagatttcgaaagatacgattcgcgaagagattaccaatccggttgttcgtcgtgcggtaacgaaaacaattaaaattgttgagcagatcatccgtcgttatggtaaacctgatggcattaatattgaattagcgcgtgagttaggacggaactttaaggaacgaggcgatattcaaaaacggcaagataaaaatcgccagactaacgacaaaattgctgctgagctaacggaattaggtattccagtcaatggacaaaatatcatccgttataaattgcacaaagaacagaatggtgtcgatccttacacaggtgatcaaatcccatttgaacgtgcatttagtgagggttatgaagtcgatcatattattccgtacagtattagctgggatgatagctacaccaataaagtgttgaccagtgcaaaatgtaatcgtgaaaaaggcaaccgaattccgatggtctatttagcaaataatgagcagcgtttaaatgcgttaaccaatattgctgataacattattcgtaattctcgtaaacggcaaaaacttttgaaacaaaaactaagcgatgaagaattaaaggactggaagcagcggaatattaacgatacacgttttattactcgcgtactatataattatttccgccaagcaattgaatttaatccagagttggagaaaaagcaacgtgttttaccattaaatggtgaagtcacttcaaaaattcgcagtcgctggggatttcttaaggtgcgcgaagacggtgatttgcatcatgcaattgatgccactgttattgcagcgattacgccaaaatttattcagcaagtaactaaatatagtcaacatcaagaagttaaaaataatcaggctttgtggcatgatgctgaaatcaaagacgctgaatatgcagctgaagcgcaacggatggacgctgatttatttaataagattttcaatggttttccgttaccttggccagaatttctggatgaattgttagcccgtatttctgataatcctgtagaaatgatgaaaagcagaagctggaatacgtatacaccaattgaaattgctaagttaaagcctgtatttgttgttcgtttggctaaccataaaatctctggtccggcacatttagatacaattcgtagcgctaaattatttgatgaaaaaggtattgtgttgagtcgagtcagcatcactaaactaaagataaataaaaaagggcaagttgctaccggggatggtatttatgatcctgaaaatagtaataatggggataaagttgtttattcagcaatcagacaagcgttggaagcgcacaatgggtctggagaattagcttttccagatggttatttagaatatgtggatcatggcactaagaaactagtgcgtaaagttcgagtggctaagaaagtttcgctaccagtacgattgaagaacaaagctgcagcggataatggctcgatggtacggatcgatgtctttaatactggaaagaaatttgtatttgtaccgatttatattaaggatacagttgagcaggtactaccgaataaggcaatagcgcgtggaaaatcattatggtatcaaattactgaaagtgatcaattctgtttctctctatatccaggtgatatggtgcatatagaatccaaaacgggaatcaaaccgaaatactccaataaggaaaataatactagtgttgtaccaattaagaatttttatggttactttgatggagcagacattgcgacagccagtattctagttcgtgctcatgatagttcctataccgctaggagcattggtatcgctggattactaaaatttgaaaaataccaagtcgactatttcggtcgctatcataaagttcatgaaaagaagcgccaattgtttgttaagcgagatgagtaa

SEQ ID NO: 308 - DNA, 4107 bp, Lactobacillus curvatus CRL 705
atgagtcgtccgtataacattggtttagatattgggactagttcaattgggtggtcagtggttgatgaccaaagtaagctggtcagtgtaagaggtaaatatggttatggggttcgtttatacgatgaaggacaaacagctgcagaacggcgcagctttagaacaacacgtcgccgattaaaacgacgtaaatggcggttaggattgttaagagaaatctttgaaccctatatcacgccgattgatgatacttttttcttacggcaaaaacaatcaaacctaagtccgaaggatcagcgaaagttatatacacaaacaagtttatttaatgatcgaacagatcgggcattctatgacgattatccaacgatttaccatttaagatataggctaatgaccgagaaacgtcaatttgatattcgcgagatttatttagcgatgcatcatattgtgaagtatcgcgggcactttttaaatgaagcgcccgtctcatcctttaagagtagcgaaattaatttagtggctcattttgacagactaaacacgatttttgctgacttgttcagtgaatctggctttcaactagagacggataaattggcggaggtcaaagcgctcttattggataatcaacaaagtgctagcaatcggcaaagacaagcattatcactgatttatacgccaagtacgaataaggcagttgaaaagcagaataaggcgattgcgacagaattattaaaagcaatcttggggttaaaagcgaagtttaatgtgcttactgggatcgaagccgaagatgttaaagcatggacactcacttttaatgcagaaaactttgatgaagaaatggtcaagttagagagtagtcttgatgataatgcccatcaaattatcgaaagcctacaggaactttattctggtgttctattggcgggaatcgttcccgaaaatcaatcattgtcgcaagcgatgatcacgaagtatgacgatcatcaaaagcatttaaaaatgctaaaagcggtacgggaagcgttagcacctggagaccgacagagattaaagcaggcttatgaccaatatgttgatggtcaagaaaatacgaaggcctattcgaaggaagatttttacggagatatcacaaaagccttaaagaacaacccagatcatccgattgtgagtgaaattaaaaaattaattgaacttgatcaatttatgccaaaacaacggaccaaagataatggggcaatcccgcatcaactacatcaacaggaattagaccggattattgagaaccaacaacaatactatccctggttagcggaacttaatcccaattctaaacggcaaacagtcgctaaatataaattggacgaattagtggcctttagagtaccatactatgtggggcccctgattacggctgagcagcaacgacaaagctccgatgcgaaatttgcgtggctgattcgtaaagcagaaggccggattacaccgtggaacttcgatgataaagtggaccgtcaagcatccgctaatgaattcattaagcgcatgacaacgactgatacttatttattggctgaagatgtactccctaaacagagcttaatttatcaacggtttgaagtgttgaatgaattaaacggacttaagattgatgaccaaccgattacgacggagttgaaacaagcaatatttacggatttatttatgcaaaaaataagtgtaacagtgaaaaatattcaggattacttggtatcagaaaagcgctatgcaagtcgtcccgcaattactggtctatccgatgagaacaaatttaatagtcgattaagcacgtatcatgacttaaagatgattgttggagatgcggttgatgatgttgataaacaagccgatttggaaaaatgtattgaatggtcaacgatttttgaagacggcaaaatatatagcgccaaattgaatgaaatcgattggttaacggatcagcaacgtgtgcaattagctgctaaacgctaccgcggttggggtcgtttgtcggctaaattattaacgcaaatcgtcaatgcgaatggacaacgaattatggacttactctgggatacaacggataacttcatgcggattgtgcactctgaagactttgataaattaattactgaagctaatcaaatgatgctagctgaaaatgatgtacaagatgttatcaatgatttatatacgtcaccacagaataaaaaagcgctccgccagattctgcttgttgtcaatgacattcaaaaggccatgaaaggccaggcgccagaacggatattgattgaatttgcgcgcgaagatgaagtgaattcacgactttcggtgcaacgtaagcgccaagttgaacaagtctatcaaaatatcagcaatgaattgctaaataatactgaaatcagaaatgaacttaaggatttatcgaattctgcattgagcaatacgcgcttattcttgtacttcatgcagggtggtcgggatatgtatacgggtgattcgttgaatattgatcgtttatcgacgtacgatattgatcatattttgccacaatcgtttattaaggataactcactagataatcgggtattagtttctcaaaaaatgaatcgtagtaaagcagatcaagtaccgactgactttacaagtgtcgaacttggacaaaagatgcagattcaatgggaacagatgttgcgagctgggttaattaccaagaaaaaatatgataatttaacgttaaatccggatcatatcagtaaatacgccatgaagggctttattaatcggcaattagtagaaacacgtcaagtcattaagttagcaacgaatttattgatggaacagtatggtgaagataacattgagttaattactgttaagagtgggttaacccatcaaatgcgaacagaattcgattttccgaagaatcgtaatctaaataaccatcatcatgcattcgatgcttatctgaccgcattcgttggtctgtatctattgaagcgctatcctaaattaaaaccttattttgtatacggtgagtatcagaaggcaagtcagcaagataagtggcgtaactttaattttctaaatggtctaaagaaagacgaattggttgatgaaaatactgaagcggttatttgggataaagaatccggtctagcttacttgaataaaatatatcagtttaagaagattctagtgacccgcggagtgcatgaaaattcgggagcactatttaatcaaacgctctatgcggctaaagatgataaagcaagtggtcagggcgggaagcaattgattccagctaagcaagatcgatcaactgcgctctatggtgggtactcagggaagaccgttgcctacatgtgtattgtacgcattaaaaataaaaagggtgatctctataaagtctgtggtgttgagacgagttggttagcgcaacttaaacaactgacggatgaagattcacaaaaagcattcttagagcaaaaaattagtccgcaatttacaaaagtgaagaaacaaaaaggtaatatcattgaggccgtagaagaattcgaagtcattgcaccacatatcctaatcaatcaacgtttcttcgataatggtcaagaattgacattgggctctgcgacgtataaacacaatgagcaggaattgattcttgataaaacggctgttaaattattaaatggcgcgctacctttaacacagtctgaagaacttgctgaacaagtttatgatgaaatcttagatcaagtgatgcactatttcccactgtatgatactaatcaattcagagctaaattatctacgggtaaagcagcctttatgaagttaccatggaagagtcaatgggatggtaataagatggtgcaggttgggcaacaggttatattggatagaattctaattggattacatgcaaatgctgcgatgagtgatcttaaagtattgaaaatgaccacgccatttggaatgatacagcaatccacaggaattacactgtcggctgatacccaaattatctatcaatctccaaccggtttattcgaacgacgagtagctttaagggatttataa

SEQ ID NO: 309 - DNA, 4284 bp, Lactobacillus delbrueckii subsp lactis CRL 581
atggctaagcccaaagattatacaatcggccttgatattggtactaattccgttggctgggttgtaactgacgaccaaaacaatattctgcgaattaagggtaagaaagcaatcggtgcccgtttattcgctgaagggaaagtggcagcagaaagaagaagctttagaacgactagacgccgtctctcaagaagaagatggcggattaaactgctggaagagctctttgataaagaaattgccaaggtagacccgagtttctttgcaagactgcacgaatcttggatttcacctaaagacaagagaaagcgctactcagcaattgtctttcctagtccagaagaagataaaaagttccatgagtcatacccaacgatttatcatttgcgcgacaagctgatgaaggatgatcagaaacatgacattcgggaaatctacattgctgtgcaccaaatgattaaagcacgcggtaatttcttgcatgatgaatccgtagaaacttatcgttcagggatgagttcattgggtggccgaagcgaaagaaccattttaagcgttcaaactctggaagagttgaatgatctctttgctgaaaatgaaggcacggaggaagccaaattaaatgttgcttcagctgagcagattaatgacatcctcaccggtggccatttgaatgctgacagccaaaaagagattggtaaccttttgttgccaagcagcttcccaagtttcgatgacaaagcgaaggaaaagcaggtcaagaaactgatcaaaaatgtggcaacgaatatttctaaagcctggttgggctataaggcggatttctcaactattctgaatctcgccaatgttgacaaggatcaaaagaagatctttgcttttgctttacaaggcggggatgaagaagacaaagtacaagaattggaatccttgttggaacaaagccaaactgatattgtggatcgccttattgaaattcggcatgctattgttctgagtgagattgtcccagtcggaatgaccttgtctgaagcgatgatcgataagtatgatcagcataaagaagacttgattactttaaaggctgttattcggaataccaaggacaaaaagaaagctgccaaattacaagcaatttatgacttgtacgtcaacaaccgccatgcagatttggcaaaagcaatgaagttgactggaattaagaagagaagcgaactgcttgatcctgaggaactcaagaaagcaatttccagtttgttggatgactctccagaagctgttgaaattaagcaaatgctcgaggaaaagacctttttgcctttgcaaagatcaaacaacaatggtgtaattccaaaccagcttcatcaagtagagcttgatgagatcatcaagaagcagagtaagtactacccattcttggctgagaaaaatccagatgaatctgaagaagcccaaaagaaggctccaactaagttggatgcattgttgactttccgcgtgccgtactacgtggggccgatgattaccaaagaagaacaggaagcacaggacggccacagctttgcctggatggttcgtagagatcctcaagaccatgaggcgattactccatggaactttgagaaaaaagttgataagatggcttctgctactcagtttattaagcgtatgacaacaaaagatacttatttgcttggtgaagatgttttgcctgcatcaagcttgaagtaccagttgtttacggtcttgaatgagctgaacaatttacgggttaatggtaagaagctgactagtgatgaaaaagaacaagtgattgaaggcttgttcaagaagcagaagactgttaaagctgacaaatttgtcaaatattggcaagcaaagcatataggcgctgatattaaagttaaaggcctttcggatccgtcaaagttcaactcgacaatgtcaacctatatcgactttaagaaaatctttggtgatcagcttaatgatgtaaatcggcaaaatgattttgaaaagatcattgagtactcaacgatctttgaagaccgtaagattcttgaagacaagttacgggctgattttgcttggctgagcgaagaacaaattaagcaactttgccgtctgcgcttgcaaggctggggtcgtttgtctgacaaattgttgactcgtttgacagatgctgatgggcaaaatgttcttgaacgtctttggaatagcaatgacaactttgttcagattgtcagtgatccaaacatcaaggctaagattgaacaagaaaatcagaagctcctgcgtgatggccagtctgatgatgcagtagaaagtattttggatgatgcatatacttctcctcagaacaagaaggctatccgtcaagtaatgcgcgttgttcacgatattgtcaaggcatgtgacggcaatgtaccagcgaagtttgctattgaatttgctcgctcgcaagaggacgatccaaagagaactactgctagagtaaatcaaatgcagaagatctacgatcaaatcagtgatgaagtggtcagccagggcgtcaaagagcagcttagtggaatgaagtcactcaaagaccgctactacctatactttatgcagggcggcagggatgcttatactggtgcgaaactgaatattgaccggctgtcagattacgatattgaccacatcatgccgcagtctttcgttaaagatgattccttagacaaccgagttttggttgcgagagcagtaaacaatcaaaagtctgataaagttcctgctttgctctttggcaataaagtggttgctgatttaggaattactgttcgagaaatgtgggacaaatggcaaaagctcgggatgatttccaagagaaagttgagtaatcttctcactgatccggatgctctgacagaatatagagcacaaggctttattcggcgccaattggttgaaactagtcaagttattaagttgacggcgactattttgcaaagcgagttcccagacagcaagattattgaagttccagctaaatataactcgattgtgcgtaagcaatttgatttgtacaagagccgtgaagttaatgactatcaccatgctatagatgcctacttaagtacgattgttggtaactatctctaccaagtttatccaaacttgcgcaggatgtttgtctacggtgagtttaagaagtttagttctaatgctgaagaatcagcctatgatgtggttagacgcgttaagtcaatgaacttcttggatgatttgcttcgtggtacacatggtgacaatatttactgcagaagtactggtgaaattgtattcaacaggaacgatattatctctaagcttaagcaagcatactcttttaagcagatgctggtaacgcaggaggtctttactaagaaatcagccttatttgatcaaacggtttacccgtcaccagaaagagactcgaagaagcggtctggtttaattcctagaaagaagggaatggataccgagatctacggtgggtacagtggtaataaagatgcctactttgtcttggcagaggctgtaaaggaaaaaggacacacattgcagatcgtcggtgttccgattcgtgcgttaaacactctgaagaattctgcaaactattctgaaaagctgttagaaattattaagccgcaggtaatgtttaacaaggatactggtaaacctattaagggaatcaaggatgtcaaaattttaatggacaaaattccatgtcgtcagcctgttttggaaggtgaatcttattatatgcttgccagttcaaaatataggtatagtctcaaacaaatttccttaagtcaaatgtcaatgaagtacattcttgactatattgacgatccgaattttaataaacatgaaatgattaacattgatcaacaagacgaaaaggaatgtttgctctcagtttatgatgaaatcttagaaaagatggacaaatatcttccgctattcgatattagaagcttccgtaagaagttgcatgatggcagggatgcttttattgctttgccagtcgcaagcgaagaaaaaaagcctggtaaagttgatgttattagaaaggtcttgaaaggtcttcatgcaaacgcagatataacaaatttggctgaattgggctttggcacagcagcattaggtgctttagtgtcaacaggtggaattaagatttcagatgatgctgtattcatttatcaatcaccaactggattattcgaaagaagagtcaaggtctctgatttactgaaatag

SEQ ID NO: 310 - DNA, 4297 bp, Lactobacillus delbrueckii jakobsenii DSM 26046
gcgaaataaagagaaaaagaagggaaaaagaaaaatggctaagcccaaagattatacaatcggccttgatatcggtactaattccgttggctgggttgtaactgacgaccaaaacaatattctacgaattaagggtaagaaagcaatcggtgcccgtttattcgctgaagggaaagtggcagcagaaagaagaagctttagaacgaccagacgccgtctctcaagaagaagatggcggattaaactgctggaagagctctttgatgaagaaattgccaaggtagacccgagtttctttgcaagactgcacgaatcttggatttcacctaaagacaagagaaagcgctactcagcaattgtctttcctagtccagaagaagacaaaaagttccatgagtcatacccaacgatttatcatttgcgcgacaagctgatgaaggatgatcagaaacatgacattcgggaaatctacattgctgtgcaccaaatgattaaagcacgcggtaatttcttgcatgatgaatccgtagaaacttatcgttcagggatgagttcattgggtggccgaagcgaaagaaccattttaagcgttcaaattctggaagagttgaatgatctctttgctgaaaatgaaggcacggaggaagtcgaattaaatgttgcttcagctgagcagattaatgacatcctcaccggtgaccatttgaatgctgacagccaaaaagagattagtaaccttttgttgccaagcagcttcccaagtttcgatgacaaagcgaaggaaaagcaggtcaagaaactgatcaacaatgtggcaactaatatttctaaagcctggttgggctacaaggcggatttctcaactattctgaatcttgccaaggttgacaaggatcaaaagaagatctttgcttttgctttacaaggcggggatgaagaagacaaagtacaagaattggaatccttgttggaacaaagccaaactgatattgtggatcgccttattgaaattcggcatgctattgttctgagtgagattgtcccagtcggaatgaccttgtctgaagcgatgatcgataagtatgattagcataaagaagacttgattactttaaagtctgttattcggaataccaaggacaaaaagaaagctgccaaattacaagcaatttatgacttgtacgtcaacaaccgccatgcagatttggcaaaagcaatgaagttgactggaattaagaagagaagcaaactgcttgatcctgaggaactcaagaaagcaatttccagtttgttggatgactctccagaagctgttgaaattaagcaaaggctcgaggaaaagacctttttgcctttgcaaagatcaaacaacaatggtgtaattccaaaccagcttcatcaagtagagcttgatgagatcatcaagaagcagagtaagtactacccattcttggctgagaagaatccagatgaatctgaagaagcccaaaagaaggctccaactaagttggatgcattgttgactttccgcgtgccgtactacgtggggccgatgattaccaaagaagaacaggaagcacaggacggccacagctttgcctggatggttcgtagagatcctcaagaccatgaggcgattactccatggaactttgagaaaaaagttgataagatggcttctgctactcagtttattaagcgtatgacaacaaaagatacttatttgcttggtgaagatgttttgcctgcatcaagcttgaagtaccagttgtttacggtcttgaatgagctgaacaatttacgggttaatggtaagaagctgactagtgatgaaaaagaacaagtgattgaaggcttgttcaagaagcagaagactgttaaagctgacaaatttgtcaaatattggcaagcaaagcatataggcgctgatattaaagttaaaggcctttcggatccgtcaaagttcaactcgacaatgtcaacctacatcgactttaagaaaatctttggtgatcagcttaatgatgcaaatcggcaaaatgattttgaaaagatcattgagtactcaacgatctttgaagaccgtaagattcttgaagacaagttacgggctgattttgcttggctgagcgaagaacaaattaagcaactttgccgtctgcgcttgcaaggctggggtcgtttgtctgacaaattgttgactcgtttgacagatgctgatgggcaaaatgttcttgaacgtctttggaatagcaatgacaactttgctcagattgtcagtgatccaaacatcaaggctaagattgaacaagaaaatcagaagctcctgcgtgatggccagtctgatgatgcagttgaaagtattttggatgatgcatatacttctcctcagaacaagaaggctatccgtcaagtaatgcgcgttgttcacgatattgtcaaggcatgtgacggcaatgtaccagcgaagtttgctattgaatttgctcgctcgcaagaggacgatccaaagagaactactgctagagtaaatcaaatgcagaagatctacgatcaaatcagtgatgaagtggtcagccagggcgtcaaagagcagcttagtggaatgaagtcactcaaagaccgctactatctgtactttatgcagggcggcagggatgcttatactggtgcgaaactgaatattgaccggctgtcagattacgatattgaccacattatgccgcagtctttcgttaaagatgattccttagacaaccgagttttggttgcgagagcagtaaacgatcaaaagtctgataaagttcctgctttgctctttggcaataaagtggttgctgatttaggaattactgttcgagaaatgtgggacaaatggcaaaagctcgggatgatttccaagagaaagttgagcaatcttctcactgatccggatgctctgacagaatatagagcacaaggctttattcggcgccaattggttgaaactagtcaagttattaagttgacggcgactattttgcaaagcgagttcccagacagcaagattattgaagttccggctaaatataactcgattgtgcgtaagcaatttgatttgtataagagccgtgaagttaacgatttccaccacgctatcgatgcctacttaagtacgattgttggtaactatctctaccaagtttatccaaacttgcgccggatgtttgtctacggtgagtttaagaagtttagttctaatgctgaagaatcagctcatgatgtggctagacgcgttaagtcaatgaacttcttagatgatttgcttcgtggtacgcatggtgacaatatttattgcagaagtactggtgaaattgtattcaacaggaatgatattatctctaagcttaagcaagcatactcttttaagcagatgctggtaacgcaggaggtctttactaagaaatcagcgttgtttaatcagacagtatacccgtcaccaaagagagatggaagtaagagatctggtttgattcctcgcaagcggggaatggatccggaaatttatggcggatatgctcataatcaagattcttattttgtgttagctaaaattgaaaaagttaagggttataccttgcaaattgttggggtacctattcgatctttagaaataataaataaggcagaagatttctcaactgctttgttggacattataaagtcaaaggtgatgtacaacgaaaaaacaggtcaacctaagagaggaattaagaatgtagagattttagttaataagcttccctatcgtcaaccgattttagaaaaagatgtaagttatatgttaggtagttcagcctacaaatataacgtaaaacaaattacgcttagtcggcagtcgatgaaatacattcttgattacatcgatgatcctaattttacgaagcatgaaatgacaatgattgatgagcaaaatgaacgagaatgtttattatccgtttatgatgaaattttagaaaaagtagataagtatttgcctttgtttgacggtaataaattccgagaaaaactgcactcagctagaaaagaatttgtttcattatccgttgatgatgaagctagtgcaattgaaaagattctgcgcggattgcatgctaattctgagatgccaagtttggaaaacttaaaaattaaaccagcattgggctttttccaaatgaaaaatggtattacgctttcaaatgacgcagttcttttgtatcaatcaccaactggattattcgaaagaagagtcaaggtctctgatttactgaaatag

SEQ ID NO: 311 - DNA, 4092 bp, Lactobacillus diolivorans DSM 14421
atgagaggaaattatcacatcggtctcgatatcgggacatcttcaattggttgggcggtaatcgatgacaacgccaaggtcatgcgtgccaaggggaaaacagcgattggcgcgcgactgtataatgaaggtcaaactgccgcggatcgtcgactgtttcggacaacccgccgtcgactcaatcggcgaaagtggcgactaaagctgttggatgaaatttttgatccatacataacaccggtagatgcggccttttttgctcggttgaagcaatcaaacttatcacccaaggatcagaaccgcgactggacgggatcaatgttgttcccagatcgcactgatcgtaaatttcacaaggattatccgacaatttatcatttacgtcacaaattgatgactgaagatcaccaatttgatattcgtgagatttatttagcgattcatcacattgttaagtatcggggaaactttttaaacactacgcctgtgagttcatttagtgtctcagacgtaaaattcgatgaacaatttgaccggttgaacgaattatacgcggcggtttcacccgacgaaccgtttgcgattaatggcgataacagtaaagcaattgaaaccctgcttcttagtgacgagacaaaaaagttcgacaagcagaaacagtcagctaagttgatcttgtcagaaaccggcgataaagcgctcgataaagaaaatacaaaagtggcgactcagattagtaaggccattcttggctataaaacgcaactcgacgtcctgctcaaatacgatgcaattaattcttcggcttggaaaattgagctggacgatgaaaacattgacgatacgttgcctggcttgttatcccagttggatgagaatcgtcaggaaatggtttcaatcattcagaatctctatgcgcaagttactttaaatcagattgtgcccaatgggatgtcattgtctgaatcaatgattgaaaaatataacgctcaccgtgatcacttgaagctactcaaacagctcgaggataagattgacgatccgaaaaagaaaaagggcttggaagccgcctatgacgcttatgttggtaaaaacatgaaagtggccaatcaagatgtcttttacgccagtgttaaaaagaacttggatgattcagatcttgctaagcaaattgctgacctcattgaggcacaaaaatttatgccaaagcagcgaacttcgcaaaatggggttattccgcatcagcttcatcaacttgaactggatcaaattattgaaaaccagagtaagtattatccatggttgacggctgctaatccaaatccaaaacgaattcaccaagctaaatacaaacttgatgagttggttgcgttcagaattccatactacgtcggcccattggtaacccctgaagagcaggagaagtcggcaaatcaggtgtttgcctggatgaaacgcaagcagcccggcacgattacgccatggaactttgatcaaaaagttgatcgaatggcatcggctaaccgatttattcgccgaatgacgaccaaagatacttatttgattggtgaggacgtgttgccggacgccagtttaatttacgaacggtttaaggtcttgaatgagctaaacttggtaaaagctaattatcatcggctggcacctgctcaaaagcaggctgcttaccgcgatttgtttgagaatcaaaaatcaattagtacgaagaaacttcaaaattacttggttgaccaaggatattttacagccaaaccaaaaattaccggtttatctgatccagagcgatttaattcatcattgggaacctatattgatttcaaagaaattttcggtgatcaagtggataatccggaccgtcaagatgattatgagaagatcattgagtggtcaacggtatttgaagaccgccagatttatgaagccaagctgcgaacactggactggctcaccgaagatcaaattcaagcgttgaagacaaagcgatataacggctggggtcggctttccaagaaattgttaacggggattgttgacgaaaatggtgagcgaattattgacgttctctggaataccaaccagaacttcatgcaggttcaatcacaggaatcatttgctaaacggattcatgaagccaatgccaagcaaatgaaagtcaccggtgttgaggacattttggctgatgcctatacttcaccacaaaataaaaaagccatccgacaggttattcgggtggttgatgatattcaaaaggcaatgggtggtgtcgcgccaacgtcggtttcaattgagtttactcggtcggaagatcaaaatccgcgtcgaacgcaatcacgtgaaagtcaattgcaaaatacgtttaaggtggacgccaaagaaatcgttgatagtgatttggtaacagagttggagacggtttctaagagtaaaaaaggactaactgatcggctctatctgtacttcacccagcttggtaaagatatgtatacgggcgatccattgaatatcgatgaattgagcacttacgatatcgatcatattttgccacaagcctttattaaagatgattctttggacaaccgggttctcgtcagtaaagcggtcaataacggtaagtccaacaatgtaccagttaagctgtttggcggtaaaatgggtggcttctggaaagaattagcggatcatcgactgatcagcaaacgaaaattgaagcatctgctgacggatccagacacaattgataaatacaccatgcgtggcttcattcgtcggcaactggttgaaacaagtcaggttatcaaactggttgctcaaattttgggtgataagtaccaaaatgatgacaccaagatcattgaagtgaccgcaaaaatgaatcatcagatgcgggaaaactttaagctaatcaagaatcgtgaagtcaatgattatcatcatgctgtggatgcttatttgacagcctttgtgggccaatatttgtataaacgatatcctaagttgcggccatattttgtttatggcaatttcaaaaaattcaacgaagatcacgtgtcgttccgttactttaactttttgcatgagttaatggacgagaataataagcggattgtggagccggaaaccggcgaggttgtgttggaacgcgagccggcaattgcctatatgaagcgggtctatcactttaagtttatgctgatttcgcaggaggtgtatacgcgaagggatgctatgtttaatcagacgatttatccggcgaaggaagcgaatagaagaaaattaattgcgatcaagcatggcaaaccagttgatgtttatggtggatacagtggtagtgtggacgcttatatggcgatagttcgaattcatgataagaaaggagacaagtataaagttgttggggttccgatgagagcgttggaaattttaaatgcgactcatgataaaaaggactatgacgccaagttaaaacaaattcttgttccgaagtttaccaaggttaagaagagtcggaagaccggtgagattactaagaaggttgaagatttcgagattgttcttggcaaagtgatgtatcgacagctggtaattgacggtgataagaagtttatggtgggcagttcaacttatttgtataacgcaaggcaactcgtactttcagacagttctcttgacactttggcaagcaaagggactcttgattctgatgcagattctaaaaggctagttgctgtttatgatgaaatagtcgaaaaagttgataaatattttccactttatgataaaaatgcgttccgaagtggtctgcataaaggacgcgacaagtatttgctgttgccaaatcgaagtacctttaatggcgcaaaaaaggtccatagtggcaaaagagaaatactaaacgaaattttgaatggattacatgcaaatgcaacattgggaggtttgaaagatttgaaaatttcaactccgtttggaaaaatgcaaggtcaaagcggaattccattgtcatccaatactattatttgttatcaatcaccaactggtcttttcgaacatcgagtttcgttgaaagatttgtaa

SEQ ID NO: 312 - DNA, 4071 bp, Lactobacillus farciminis DSM 20184
atgactaaaaaagaacaaccttataatatcggtttagatattgggacaagctctgttggatgggctgttaccaatgacaattatgatctacttaatatcaaaaagaaaaatctctggggagtcagattatttgaagaagctcaaacagctaaggaaactcgactaaaccgttcaacaagacgacgctatagaagacgcaaaaatcgtatcaattggttgaatgaaatctttagtgaagaactagccaaaactgacccttcttttttaattcgactacaaaactcttgggtttctaaaaaagatcctgatagaaaaagagataaatacaatttattcattgacggtccgtacacggataaagaatactatcgagaatttccaacaattttccatttaagaaaagaattgattttaaataaagacaaagctgatattcgtttaatttatttagcacttcacaatattcttaagtatcgtggtaattttacttacgaacatcaaaaatttaacatatccaatttgaataataatttatcaaaagaactaattgaacttaaccaacaattaataaaatacgacatttctttcccagacgattgtgattggaatcacatcagcgatatcttaattggccgtggtaatgctactcaaaaatcaagtaatattttaaaagactttacattggataaagaaactaaaaagttgcttaaagaagtcattaatctaatcttaggaaacgtagcacatctaaatactatctttaaaacatcattaactaaggatgaagaaaaactcaatttttctggtaaagatatagaatcaaaattagatgatttagactccatactagatgatgatcagttcacagttctagatgcagccaacagaatatatagcactatcactttgaacgagattcttaacggcgaatcttattttagtatggctaaagtgaatcaatacgaaaatcacgctattgatttatgtaaactacgcgatatgtggcatactaccaagaatgaagaggctgttgaacaatcaagacaagcctatgatgactatataaacaaaccaaaatatggaactaaagaattatataccagtttaaaaaaatttttgaaagttgctctcccaactaatttggccaaagaagctgaagaaaagatatccaaaggaacatatctagtaaaaccacgtaatagtgaaaatggcgtcgttccttatcaattgaataaaattgaaatggaaaagatcattgataatcaaagccaatactatccatttctaaaagaaaataaggaaaaactactgtcaatactaagttttcgtataccttactatgtagggcctttacaatcagctgaaaaaaatccttttgcttggatggaacgtaagtctaatggtcatgcccgtccttggaactttgatgaaatagtagatagagaaaaatcttcaaataaatttattcgccgtatgaccgtaacagattcatatttagtaggtgaacctgtcttacctaaaaatagtttgatataccaacgatatgaagttcttaacgaattaaacaatattcgcataacagaaaatctaaaaacaaatcccatcggatctagattaactgtagaaaccaagcaacgtatttacaacgaactatttaaaaagtataaaaaagttaccgtaaaaaaattaacaaaatggttaattgctcaaggatattacaagaaccctattttaattggtttgtcacaaaaagatgaatttaattccactttaactacctatttagatatgaaaaaaatatttggctcgtcctttatggaagataacaagaattatgatcaaattgaagaactcattgaatggttaacaattttcgaagataaacaaatattaaatgaaaaattacattcttctaagtactcttacacacctgaccagatcaaaaaaatatctaacatgcgttataaaggatggggacgtttatctaagaaaatccttatggacatcacaactgaaactaacactccacaattattacaattatcaaattactctatattagatttaatgtgggcaacaaacaataatttcattagtatcatgtccaatgataaatatgactttaagaattatatagaaaatcacaatctaaataaaaacgaagatcaaaatatatctgatttagttaatgatattcacgtctcccctgctcttaagcgtggaatcacgcaatctattaagatagttcaagaaatagttaagtttatgggacatgcgcctaaacatatttttattgaagttactcgcgaaacaaaaaaatccgaaattactacttcacgagaaaaaaggattaaaagattacaaagcaaacttctcaataaagctaacgatttcaaaccacaattgcgcgaatatttagttccaaacaagaaaattcaagaagaacttaaaaaacataaaaacgatttgtctagtgaacggatcatgctttatttcctacaaaatggaaaatcactgtactcagaagaaagtctaaatataaacaaactatctgattaccaagttgaccatattttacctagaacttatatccctgatgattctttggaaaacaaagctttagtattggctaaagaaaatcaacgtaaagcagatgatttattattaaattccaatgtaatagatagaaacttagaacgttggacctatatgttaaataacaacatgatagggctaaagaaatttaaaaatttaactagacgtgtaattacagacaaagataaattaggttttattcatcgtcaattagtccaaacttctcaaatggtaaaaggtgtagccaatattttagataatatgtataaaaatcaaggaactacctgtattcaagctagggctaatctctcgaccgccttcagaaaagctctaagtggtcaagacgacacctatcattttaaacaccctgaattagtcaaaaaccgtaatgtcaacgactttcatcatgcccaagatgcttatttggctagtttcttaggtacatatcgcttacgtagattccctaccaatgaaatgttactaatgaatggcgaatataataaattctacggtcaagtaaaagaattatattctaaaaagaaaaagttacctgacagtagaaagaacggctttattatttctccattagtgaatggaacaactcaatatgatagaaatactggcgaaattatttggaatgtcggattccgagataagattttaaaaatattcaattaccaccaatgtaacgttaccagaaagactgaaattaaaactggtcaattttatgatcaaacaatctattctcctaaaaatcccaagtataagaaactcattgctcaaaagaaagatatggatccaaatatatatggtggctttagtggagacaacaaatcttccatcacaattgtcaaaattgataataataaaattaaacctgttgctattccaattcgattaattaacgatttgaaggataaaaaaacacttcaaaattggctggaggaaaacgtcaaacataagaaatctattcaaatcattaaaaataatgttcccataggacaaataatttatagcaaaaaagttggtctgttgtcattaaactcagatagggaagttgctaacaggcaacagttaattttgcctcccgaacactcagctttattacgactacttcaaatacctgatgaagatttggatcaaattctagcattctacgacaaaaatattctcgttgaaatactccaagaattaattacaaaaatgaaaaaattttatcctttctataaaggcgagcgagaattcctaatagccaacattgagaacttcaatcaggctactacctctgaaaaagtaaattcactagaagaattgatcactcttttacatgccaattctacttcagcacatttaatttttaacaatatagaaaaaaaggcttttggaagaaaaactcatggtttaacactcaataatacagattttatttatcaatctgtaactggcttatatgaaacaagaattcacatcgaataa

SEQ ID NO: 313 - DNA, 4062 bp, Lactobacillus fermentum DSM 20055
ctgatgcgtatcaaggggaagacggcaatcggggtgcggttgtttgaagaagggaagacggctgcagaacgccgaaccttccggacaacgcggcggcggttgaagcggcgaaaatggcgcttgcactacttagatgaaatttttgccccgcacttacaagaagtggatgaaaatttcttacgccgtctgaagcaatcaaatatccacccggaagatccagcgaagaatcaagccttcattggtaagctcttatttccggatctactgaagaagaatgaacgtggttacccaacactgattaagatgcgcgatgaattgccagttgagcaacgcgcccactacccagtaacgaacatctacaagttacgggaagccatgattaacgaagatcgccaatttgatctgcgggaagtttacctggccgttcaccacatcgtgaagtaccggggtcacttcttaaataacgctagcgttgataagttcaaagtggggagaatcgatttcgacaaatcctttaacgttttgaacgaagcctacgaggagcttcaaaacggcgaaggttcattcacgattgagcctagcaaggttgaaaaaattggacaactgttgctagatacgaagatgcgtaagttggaccgccaaaaagcggtcgccaaatttttagaggtgaaggtcgctgacaaagaggagaccaagcgcaacaagcaaattgcaacggccatcagtaagttagttctgggctacaaggctgattttgcaacggtagcgatggcgaatggcaacgaatggaagatcgatttaagttccgaaaccagtgaggacgagattgaaaaattccgggaagaattgagtgatgctcaaaatgatatcttaacggaaatcactagcctgttctcgcagatcatgctgaatgaaatcgtgccaaatgggatgtcgatttctgaatcgatgatggatcgttattggacgcacgaacgtcaattagcggaagttaaggaatacttggcgacccaaccagctagcgcacggaaagagtttgaccaagtgtataacaaatacattgggcaagcgccaaaggaaaagggctttgaccttgaaaaggggctcaagaagattttatccaagaaggaaaattggaaagaaatcgatgaattgctcaaggctggggatttcttaccaaaacaacggacatcagctaatgtggtcatcccgcaccagatgcaccaacaggaattagatcggatcattgaaaagcaagctaagtactacccgtggttagcaacggaaaacccagccactggtgaacgtgatcgtcaccaagcgaagtatgaacttgatcagctagtttccttccggattccttactatgttggaccgctagtaacgcctgaggttcaaaaggcgacatctggcgctaagtttgcttgggcaaagcggaaagaagatggggagattaccccttggaacctgtgggataagattgaccgtgctgaatcagctgaagcctttatcaagaggatgacggttaaggatacgtatctattaaacgaggatgtcctgcctgctaacagcttgctataccaaaagtacaacgtcttgaacgaactaaacaacgtgcgggtgaatggacgccgcctgtcagtcggaattaaacaagatatttactctgagctcttcaagaagaaaaagacggtgaaagcaagtgacgtggccagcctagtgatggcgaagacacgaggagttaacaagccaagtgttgaaggtttatctgatccgaagaagttcaattcaaatttggcaacctaccttgatctaaagtcaatcgtaggtgacaaagttgatgataactgttatcaaacggatctcgaaaatattatcgagtggcgttccgtctttgaagatggggaaatttttgcggataagttaactgaagtggaatggctgacggatgagcaacgttctgcccttgttaagaaacggtataagggctggggacgtttatccaagaagctactgacgggaatcgttgacgagaacggccaacggatcattgatctgatgtggaatactgatcaaaacttcatgcagattgtcaaccagcccgtctttaaagaacagatcgaccaactgaaccaaaatgccatcaccaatgatgggatgaccttgcgggagcgggtcgagagcgttctggatgacgcctatacttcaccgcagaacaagaaggccatctggcaagttgttcgggtggtggaagatattgttaaagctgtcggaaatgcaccaaagtcgatttcgattgaatttgcccgtaatgaaggcaacaagggagaaataacccggagccggcgtactcaattgcagaaattatttgaagatcaggcccatgaattagttaaggatacgagcttgactgaggaattggagaaggcactggatctttccgatcgttattacctctacttcacccaaggtggtaaggatatgtacaccggtgatccaatcaacttcgatgaaatttctaccaagtatgatattgaccacattttgccacaatccttcgtgaaggatgattccttagataatcgggtgttagtaagtcgggcggagaataataagaagtctgaccgggtgccagctaagctttacgcagccaagatgaaaccatactggaaccaacttttgaagcagggattgatcacgcaacggaagtttgaaaacctgacgatggacgttgatcaaaatattaagtatcggtcacttggattcgtgaagcgccaattagttgaaacacgccaagttatcaagttgacggctaacatcttgggtagtatgtaccaagaagccgggacggacatcattgagactcgggctggtttaactaagcaattacgcgaggaattcgatttaccaaaggtccgtgaagtaaacgactatcaccacgcagttgatgcttacctgacgacgtttgctgggcaatatttgaaccgccgttatccgaaattacgctccttcttcgtatacggtgagtacatgaagttcaagcgcgggtcagatctgaagctacgtaactttaacttcttccatgaattgatggaaggcgacaagagccaaggtaaggttgtcgatcaacaaactggtgagctgattacgacaagggatgaagtagccaagagctttgatcgattattgaacatgaagtatatgctggtatcgaaggaagttcacgaccggagtgaccaactgtatggagcaacgattgtaacagcaaaggaatctggtaagctcacttcaccaattgagatcaagaaaaatcgacctgttgatttgtatggtgcttatacgaatggaacgtcagctttcatgacgatcattaagtttactggaaacaaacctaagtataaggtgattggggttccaacaacatcggcggtcggtttaaaacgagttgggaaaccaggcagtgaatcatataaccaagaattacatcgaatcattaaatctaatccgaaggtaaagaaagactttgagattgtagttccacatgtttcgtatagtcagttgatagttgatggtgactgcaaatttaccctagctagtgatacttatcagcatccggcaactcagctagttctttctaaagaatcgatggaaataattgcagatgattttaaatttgtgaaagaaaatccggcaactgcggatgaacaacttgttagggtttttgatgaaattgttaatcaaatgaaccattactttactatctttgaccaacgtagtaatcgtcaaaaggtaacgaaggctcgagataagtttgtatcgttaccaacggaatcagagtatgagggtgctaagaaaacgcaagtagggaagacagaagtcattacgaacttactgatgggtctacatgccaatgctgcacaaggtgatttgaaagtattaggattatcaacctttgggtttttccagagttcaggtggactgaatttaagtgaagatgcaatgatcgtataccagtcaccaaccggtttgtttgaacgtcgcatttgtttgaaagacatttaa

SEQ ID NO: 314 - DNA, 4041 bp, Lactobacillus floricola DSM 23037A
atgaatcaaacaaaaaactatgacatcggattagatataggggttggatctgttggttggacaatcaccgattctcaatctcaaaaggttcttaaagtaaaaggtaagcaaggtattggtgtccatctcttcaacgaaggtcaaactgctgaagaacgtcgccagtttcggactaatcgtcgtcgtttaaaacgtaggaagtggcgtctaagattactcagagaattatttgatgaaccaatttcaagcattgatcctgaatttttcgcccgcttgaaatacttcaatgaatctagtaaagacccgaaaaataaaggctatcaacctcaattacacgatgatctaaaagatgttgacttctatcgtcaatatcctactatctatcatcttagacatgccctcatgacacaaaaagaaaaattcgatattcgtgatatttacttagcaatacatcatatcgttaagtataggggtcactttctcatgaatggtcacagtagtagcttttcagttgcccaaacagattggaaagcagatttaactaagctatttgaattaattcaagaaacacgcaccaacctcgacttctctttcgatttaacagaaatcgatactatcaagtctttattatttgataaaaatttaagtcgaaatgacagacaaaaagaaattgttggcttaatcaataataactcgcaattagataaaaaagataaagccctaaccaaacaactcgttgaatctgttgttaagggcattgttggtatgaaaaccagaactgatattttgcttggatatgaagttgataacaaagaacaaagtaaagcttggaacttttctattgatgagcttgatgatcaaatggctacaattgatcctgccttaagtcaaaatagtcaagctcacgatattattacgctgattcaaaagctctacatgactgttcaattagcacaaattgtgccagaaggacagtctgtatctgaaatgatgattaatcgttacaatctctatgctgaacagcttcaacaacttaaagactacaaaaaaatcaatcttgaaacgggtctattactacgtgaagcttatgatgagttaatgaccaaagcattaaccgctgcacctggcaaaactattcatgatactttctacaacaaagtcaaaaaaatactgaaagaccaagataataaacaagcgctgtcaatcaaacaagccattgaagacagtaattatctcattcctctcagaattaaaagtaatggcgtcattccttatcaacttcatcaacgagaattagacgctattattgaaaaccaaaaagaattctatccattcttagccacacctaatccagttgacggacatcaagaagctttgccctataaattggatgaattaattggctttaaagtaccgtactacgttggtcctatggttgatccggaagttgattctgaccaaaattttgcttggatggttagaaaagaaaaaggcgagattacaccttggaacttccataataaagttgatattacacaatcagcggataacttcattaaacgtatgaaaacaaccgatacttacttaattggtaaagatgttttacctcaaaatagcctattatatcaacgttataccgtacttaatgaactaaacgggattaaagtagccaacaaaaaattaactattgaacaaaaacaacgtctttatgatcagttgttcaaaaagaaaaaaacagtcaaaaagcaagacatcctcaacaatctagttgctgcaggtgaaattcatgaagatgataatctgactggattatcaaacggtacaacctttaataacaatttaggcagttacatagattactgcaaaattattggccaggataaattagaagatgcttccaaacaagccgatattgaaagaataattgaatggtccacaacatttgaagatgctaacatcttcttaacaaaattagcagaaatcaactggctaacagaagatcaacgccaaaagctgagtcaaattcgctaccgtggatgggggcaattctcaaaaacattgttaaccgatatcaaagacaataaggataactcgattattgataacttgatgtctaccaaaaaggtattcatgcagattatcaacgacaccacaatcaaacaaaaaattgacgattacaatcaatatcatcttaatcatgcagacttaaaagacaccattgctaacctcttcacctcgccacaaaacaaacgtgccattaatcaaacgttgctagtcattgaagatattattaatgctgttggtcacaagcctaatcgtatttttattgaaagtgctaaagataaccgtaatgctaaaaatcagttaactcaaagtcgattaaaacgtattgtgaaacaattcgaagacaataaacaacatgttgatcaatccgtttatgaagaacttaaacaactagatgatggttctcatgcttcaattgatgaccgcctactcttatacttcctacaaaatgggaaagatatgtatactggtcaacctattgatatttcacaactaagtactagccaatatcatatcgatcacatcctgccacaagccaaagtaatggataatgctttagataatcgtgtgctggttagttcaaaagccaatacagaaaaatcagaccgattcttgagtgaaatcccccaatttcaacaacgttcattatgggcagaacttgaacgtatgggattcttgactaaagctaaaaaagaaagactgctaatgacatcagatgaattcaaacaaaactcagttaggttcatcgctcgtcaattagttgagactcgccaaatcatcaaattagttaaccagttaattattcaagagcatcctgaagtgaaactagttaatattaaggccgacttgactaatgccttcaggaaaaagttcaatttcgtcaaaaatagaaatgccaatgattatcatcatgcattcgatgcctaccttaccagcttgattggtagtcatctgctcaagtctcaccctaaatgggaaccactttttgtttactcagactatgacaaaattaaattcgataatgccccacaaggtgtgaatatcatgaaagaattcgagcagtctaaattagctgatgaaaatggcgaaatcatctggaataaagatgaaatgatggcttacctagaacgcttatataattcaagacaaattcttatcaccaaaaaagtttatgcacgtcatggtaacttgttcaaacaaaccatcttcaaagctggtgaaagtgataacttaatccctgtcaaaaataatcgttctgatattgctatctatggcggatacaaaagtaaacaagtcagttactatgccctaattagtctgcataacaaaaaacgtcaaaagagattagtagcggtctatcttattgatatccaaaaactccaaaatctcaatgaaagtgactactttaagaccttacacaccattatcaaagaacgtcataacatcaaacctgagttcgatattctagctgataaaatctatcaaaatcagctaattattgacaataaaaatggttcaaaccgaccattcagaattgagggtgacttcaaaaatgaccgtcaactctacttgcctttacaataccaacgttggctggcatctaaagaacctacagatgaaaaactcaaccgtatatttgatcacatttgtgaacaattagctgactacttcccactatttgcgggcaatgcctgtgacaaattgctggataatcgtgataagttctatcaattatcaatcaaaagtgaattcaacgataaaggcaaactaatagctgaaggtaaactatccgtaattgataaactcttagtagcaatgcatgctgatagtcgtaattctaatttagctgtaataggactatcgtcatcttggggtagatttaaattgcacggcggaaacgaagcaatcggcacatcagttcaactaattcatcaatcaccaacaggattattcaaacgcatccaaaggtttaactaa

SEQ ID NO: 315 - DNA, 4209 bp, Lactobacillus floricola DSM 23037B
atgacatatagaaactatcatattggactagatattggaacatcgtcagttggatttgctgtaagatatgacaatggtgaattagttcataaaaaaggaagcaacttagttggggctagattattcaaagaaggggaaacagccgaagaaagacgtcttaataggggagcacgtagaagatataacagaagaaaatggcgtttaaatttattaaatcaaattttcaaaccattaattgaagtaaatgatccaacattctttaaaaggctagaacagtcaaacctagttaattatgataaatcagaatcttttagcttattaaataatcaatcagatgataagttgcatcagcaattcccaacaatttatcatttaagagattatttgatgaaaagcacagaaaaagcagatattaggcttatttatttagcagttcatcatattgttaagtatcgaggcaattttttagatgcttcgcctgtagattcatttgaagcatctaacttaaaggtagacgaaattcttacacaaattaatttattattggataatttaacagacgatttacgacttaatactcaatatgtaacagacatcgaacaaactttactttccaatactgaaagtaataaagataaagaaaaagttattcaaaaactactactacataaagaagcaattaagattgataaagataggactgctcagattgcgaaattggttttaggttataaagctgacatagccaaattatttggaattactgaaaaacttcaaacacctaaattagaattatcagctgccaatagtgacgatgctttgatggaactaagtgcagaattaaatgaagaccaaataggtattttactccaattaaaaacactttattcaagagtcagacttaaccaaattattccttcaggaactagtttatctaagtctatgattgaaaaatatgagttgcatcatacacaattaaaatcattcaaagaaaacattttattaaagttacgaagaaatactgcagttagacgaaatttagaattagcttatgctttatatgttgggaacgctcagacaaaacaagaagtttttgaacctaaaaaagctcgatttacaagtgatgactttgcgagtttaaaagctaatgcaaaatcagcatctagtgttaaagaggcacccaaaaatacaaaaacgaaattaacaactgatgacttctacaatatactaactgaactgtttgcgacatttgaatcagaattgtcagcagacgaagatatgataaaagaagttgaacaaattaaaaaagcaattactggggataattatttacctaagcaaagaacagatcaaaatggtaatattccgcatcaactgcatcaaattgaattaaggcaaattcttcaaaatcaactgccacattatccagaaatggataaaatcaatgagcaaaagccaatagaaaaactagtaacatttcgtgttccttattatattggcccattaattacgcctgaagaccaacaaaagtcatcagctgctaattttgcttggatgaagcgaaaagaacaaggtgcaattacaccttggaattttgatgataaagttgatcgcatgcaatctgctacaaactttattaaaagaatgactgttaaagatacttatttaattaatgaagatgttttaccagatagaagtctcttataccaaagatttaaagttttaaatgaattaaatttagtcaaagttaataaccaattgttgtcaattggtgagaaacaagctatttatcatgatttattcgaaaaacaaaaaacagtaagcactaaaaaattgcaaagttatcttcaaagcgaacaaggatatggggataatatcgagatatcaggcttatcaaatccagacaaatttaataatggcttaactacatatattgatttcaaaaatatttttggtgatttagtcgaagatacaacgaagcaaaaagaatttgagcaaataatagaatggtcaacagtatttgaagatagagctatttttaaagcaaaattgcaagaagtgaactggttgacagaagaacagattaaggcactggtagctaagagatatagtggctggggcagattatcttatcgactactcgcagagttagtaaatgacaatggtgaaagaattattgatattttgtggaataacaaagggagcaatttgatgagtattgtctcgcaagatgagtttcaacagcaaattgcacgaatcaatagccacgaagttcaagaacttgggatggaaagtgttttggctaatgcttatacttcaccgcaaaataaaaaagccattcgacaagtaatgaaagttgtcgatgacattcaattagcaatgaatggacaggcaccaacctcgatttcaattgaatttactcgaaaacctgaagaaaatagtgaaattagcaagtctagatatgaaacaattacctcaatttatcaatcactttctaaagatattgaaaaagaggtgaaggataatctaaataagaacaagagcagtcttaaaaagaatctgtcagataaatactatctgtactttacacaattaggacgcgatatttacacaaatcaacccattccatttaatgaaattccttattatgacattgatcatattgtgccacgttcagttgaaatgaatgattctttaaacaatcgagtactagtagcgaaaagcattaaccaaatcaaaaaaaataatgcacctatcgatagttcattgaagataacaagtgaaacacgtcagttgtggaaaaaattattagatagtggcttaattaccaaacaaaaatattataaattaagcagtagtattaagaatacggttagtccttacgttaaacagggcttcattaatcgtcagttggtagaaactagccaagttatcaaattggttgctaatattttgggaactaagtatcaaaatgatgatactgaaattattgaagttaaagcccatttaaactctgaaattcgtaagacttttgagttctataaacttcgagaacttaatgactatcatcacggattcgatgcttatttgacaacacttgttggtggttacttatataatcgttatcctaagttaagaagctattttgtttatggtgatcataagcgtttagataaagcacaactttctgaacttaaaaactttaacttcttacatggcttgactaatccaaagtctggttcagacgggttaattactgcatctggctcacaacaagttgtgttagacagaaatgaaacgatcaaaagattaaacaaaatttatcgatacaaatatatgttaatctctcgtgaagtatttactaaacaaggacaattctataacgagacgatttatccagcaaaacctaatacagctaaaatgatacctttgaaagacaacaagccaagtgaagtctatggtggatattcaagtagtaacgtttctaagattgctttgataaaggaaaagaatactgataattatcagtttattggtattccaattcgctctattgctaaattaaagcaagcaaaagccaatagtaaaacagtttatcaaactgaactcaatcgagtgattaaatctgtattagctagtcaaaaaactaaaaagcaaaaagaatttgaagttatattggataacgttaaatataaccaagtggtggttgatcaaggagagaaatactatctaggaagtccttactataaaaagaatgcaaaacagttagtgattagtcctgaatcggttaaaatattggctgataaagcaactgcagacttacctgaacaagaggctcacaacaaattaatgacagtttatcaagagattgtagacgtattaaataagcattttgctttatatgatataaataatgttcgaaaaaaattaaatgacggattaattaaatttagccaattgccaaattatgatgaaacatcaaaaaatagatttgatatttctaagtcaattaagactaagtatgctgttattatgagaattttgagtggtattaaaaatcaaacaagcgaggttccagaacttggcttaaaatctccgttaaataagatgcaaacaaaaggtggtataaaaatttcacccgaagctaaaatatattactcatcaccgactggaatttttagtcactttaaacaagttaaaaatctataa

SEQ ID NO: 316 - DNA, 4095 bp, Lactobacillus fuchuensis DSM 14340
atgaataagcgatataatattggattagatattgggaccaattctatcggctggtcagtggttaatgatcaaagtcagttagtcagaattaagggaaaattagggtacggtgttcgactgtacgatgaaggtcaaacagctgaagaccgacgactgtttagaacgacgcgccgccgcttaaaacggcgtaaatggcgcttaggtttattacgcgaaatttttgaaccttacatcacaccgcaagatgcgacttttttcttaagacagaaacaatcgaatttaagccccaaggatttacaaaaacagcagccacaaattggtttatttaatgatcgtttggacagcgattttcactatcaatatccgacaatttatcatttgcgctacgcgttaatgactgaaaagcggcaatttgatttacgcgaaatttatttggcgatgcatcacattgtcaaataccgggggcattttttgaacgcagctgccgcgtcatcttttaaaagcggagaaattgatttagctaaggatttcgcagcgttaaatcagatttttggaacaatctttagtgaagtcggcttcagtttatcagaaagcaatttagatgagattaaatcaattttgttggataacaatttaagcgctagtgtgcgccaacgcaaagcactaccgttaatttaccaaaccgctgcttcaaaagattcggaaaagcaatataaagcaattgcaactgaattattgaaagcgattctaggcttaaaggcgaaatttaatctcatcacaggtatcgaagtcgaagatgtcaaagcgtggacgttaagttttaatgctgaagattttgatgctaagttgagcgacttaaatattgcggataatgatgacgccgtacaaatcattgaaattttacgagctctttattcaggtgttttactgactgggattgtgcctgagggacaatcaatttcacaggcgatgattgataagtatgaagcgcataaagcacatctgataatgttgcggtcaattcgcgaacaattatctgataaagaaaataaagcacttgaaaaggcatatgatgactatattgatcatccggaagataagcagcacggttcacgtgaggatttctatgcggcaatcacgaaagtattaaaaaaagattcagaggatacaaatattatcgaaattctaaaattgattgaattggatcagtttatgcctaaacaacgcactaaggacaacggcgccattccacaccagttacatcaacaggaattggatcaaattattgaaaatcaaaaacaatattatccttggttggcggacattaaccccaatgaacaacggcaaaaaatggcgccctataaattagatgagttggtgacattcagagtgccttattacgtcggcccgatgattacggctgaagaacagttccaaacttctaataaaaaatttgcatggatgattcgtaaagaaccaggcgcgattacgccgtggaattttgatcagaaagtcgaccgccaagcttccgcgaatgaattcattaaacgaatgacaaccactgatacttatttgttggccgaagatgttttgccaaagcaaagtttgttgtatcaacggtttgaagtattaaatgaattgaatggcattaaaattgatgatcaaccgattacggtcgaacaaaagcaagccatttttaacgataaattcatgcaacaagcgcatgttacggttaaaaatattcaagcttatctcgtctctgaggggcagtatgcgagtcgaccaaacattacgggtttgtcagatggtgagaaatttaatagtagtttgagtacttaccatgatcttaagaaaatctttggggatatgattgatgaccctaataagcaaaccgattttgaaaaaatgattgaatggtcaacgatttttgaggatggcaaaatatttgctgataaattacgtgaaattaattggttaacagacgaacaacgccagcgactatcgaataaacggtaccgtggttggggccaattatcgactaaactattaaccaaaattgtcgatcaaaatggtcaacggattatcgatattctttggaataccaatgacaattttatgcggattattcattctgatgattttgatcaggccgtgactcaagctaaccaaatgttattagcggataatgatacgcaagatgtaattaacgagttatacacgtcaccttccaataaaaaagctctacgacaaatattactagtcgtggccgatattcaaaaggcgatgaaggggcaagcaccggctcggattttaatcgaatttgcgcgtgaaaaacaagctaatccgcgattatcaacacaacggcgtcgccaagttgaacaagtctatcaagagctaaataatgatcagctcaacaaagaattggccgatccacagtatgctaatttatcgaaagatcgactattcttgtatttcatgcaaggcggtcgggatatgtatacgggtgagtcgttaaatattgatcggttatcggagtatgatattgatcatattttaccgcaagcctttatcaaagataattcgttggataaccgggtattagtatcggcaaaaatgaatcggagtaaatcagaccacgtaccgcttgattttactgaagaacgatttgggcaaaaaatgcgcagtcagtgggaacaaatgttacgggccggtttgctgacgcgccgtaaatataataatttaacgttaaatccagatagtctcaataaatataccatgagtggctttatcaatcgccaattagttgaaacccggcaagtgattaaactcgcaactaacttattagtcgatcaatatgccgatgaagacgtgcagttagtgacggttaaaagtggcttaacccaccaaatgcgcgaagattttgattttcctaagaatcgaaatttaaataattaccatcacgcttttgatgcgtatctaacggcttttgtgggcctctatttactgaagaaataccctaaattggcccattatttcgtctacggtcaataccaacaaggttttaaggccaatgaccagtggcgtaactttaattttctaaatggtttacgtcaagagcaacaggtcgatgctgaaacgggtgagcttatttggcaaaaagaccatgatttagcttatatgaataaaatctatgatttcaagaaaattctggtgacgcgtgaagtgcatactaatcacggcgcgttgtataatcagacgctctataaagctaaagatgacaaagcgagtggtcaaggtggtcgtcaattgattgcagctaaagaaaaccgaccaacggcaatttatggtggttattctggtaaaacagtcgcttatatgtgtttagtgcgaattactgaaaaaaagggtgatttttatcgtatttgtggggtgcaaacagcttgggttgatgagctagaacacattgaagacgcaacgattaagctgcaaagattgactgcattattaacgcctcaattttccgcgactaaaaagcaaaaagatgaagttgtgacagtcgttaaaccattcgaagtgctcttaccgaaaattttaattaatcaacggttctacgacggtggccaagaactaacattggcatcggcaacttataaaaataatgcgcaagagttagtacttgataaaaaagccgtgcaagtgttaaatggccaattgccaaaggctgagttggaggcacaggcaacagttgtttatgatcaaatattagaacgagttcagaaatatttcccactgtatgacatgaatagttttagagagaaattatttgtaggacgtgataaatttaacgaattaccatggcaggatcaatgggagaatcataaattaattcaggtgggacaaaagacaattttagatcgaattttgattggattacatgcgaatgcagcgatgggggatttaaaagcactaaatatgtctacgccgtttggaaaacttcaaaaatctaatgggatatcgcttagccctgagacccaaatcatctaccaatcaccgaccggtctgttcgaacgacgtgtggctttgaaagatttatag

SEQ ID NO: 317 - DNA, 3390 bp, Lactobacillus futsaii JCM 17355
atggcagatagaatcagtttaggtttagatattggtgtggcctcggttggattcagtgttttggacatcgacaagggtaaagtcatcgaattaggttctagattattcaatgcaactgttgctgaaggtaatcaagaccgccgtagtatgcgtggtgctagacgattattgaatcgtaataaacaacgtcgccaagatactggtaagttatttcaaaaatttggcttgttagacaattttaacaaggataatttttatgatactttcaatcaaaattggaatccttatgaattaagagttaagggattaactgaacacttaactaagaaagaattggctgagagtttgtatcagattgtcaaacatcgtggtattagctatgccttaaaggatgccgatgctgatgaaggtggaactgactattcagctagtttaaaaatcaatagtcaagaattggctgagaaaactcccgctcaaattcagttacaacgtctaaatgattatggcaaagttagaggacaagtagttattggagatgatcctgataatcaaaaagtattattaaatgtctttccaacgagtgcctatgaaaaagaagctaagcaaatcattgctactcaaaaacaattttatccagagattttgactgatgagtttactaaagaatattgcaaaattttgactagaaaaagagattattttgttggaccaggtaatgagaaatcacgaactgattatggaatttataaaaccgatggtcgaactttggataatttattcgaagagctaatcggtcacgataaaatatatcctgacgagttaagagcttcggctgcatcatacactgcacaattgtttaatgttttgaatgacttgaataatctaagaattttgagttatgaagacggtaagttaactaaagaagacaaagaaaaaatcattgccgaaataaagagtaatacgacaacgataaatatgttaaatgttattaaaaaagttgctggttgttcaaaagaggacattaagggatttcgtgtcaacgaaaaggacaaaccagaaatcagctcaatggcggtttaccgtaaagttcataaggacttactcaaggtaggggttgatataagtgattggccggttgagtttatcgataagttaagctttattttgaccttaaatactgagaatggtgaaattagaaaacaacttaataatcgattagtcccagaatttgattttttgaatgatgatttgattcaattgattattgataataaagatagttttgaaattaaaactaataataaatggcatcgtttctcattgaagacaatgaataaattgatgcctgagatgcttgaacgtcctgttgaacaaatgactttgttgaatgaaatgggtttggttaaaaaggataagaaacgttttgaaaataacaagtacttgccttacaaagaaattgcgaaggatatctttaatccagttgcgtctaaatcagttcgtgaagctttgaaaattgttaatgcagttctgaagaaatacggacacattgactatttagttattgaaatgccacgtgataagaacttaaaagaagaacaagataacattaaagaatttcaaaataaaaataaaaaggccaaagatgctgctttcgaggcctttgttaaatcagtcggtagtgaacaaagagtaaaagaagctttgagtaagaaccgtaaattacaaatgaaaatgcgtctgtggtatcaacaacaagaaattgatccatataatggtgaaacaatcgatgctactgatttaatcaataatcctgataaatttgaaattgatcatattattccacaatcgatttcttttgacgatagtatcaataacaagaccttgtgttttgcttcgatgaatcaagttaaaggacaaaaaacaccttatgaattcatgcttgaaggtcatgggcaaggttatgacaaatttaaggctactgttttagataataaaaacttcgacagaaataaacgtaagaattatctctttgaagaaaatgtcagtgatattgagacaagaaagagattcttatcacgtaatttagttgatacgagatattcttctcgagtagtacttaatagcttgcaagatttcttccatgaaaaatcagctgatactaaggtaacagttattcgtggtaaatttacctccaacatgcgtaaacattggcacattgataaaactcgtgaaactttccatcaccatgcgattgatgcctcaattattgcagctactccgtttttgagaatgtggaaaaaaggtggcacaattttcccagttaaggttggtgaagaatcaatcgatattgaaactggcgagattttggacgataaaaaattcgataaagtgatgtatgaggaaccttataatggttttgtttctgaaatcatgaatgcagatgatcgaattaaattctcacaccaagttgataaaaagatgaatcgtaaagtaagtgatgcgacaatttattcaactcgaactggtaaattagctaaagataaaaaagatgctgagtatatcgtagctaaagtgaaagatatttatagtgtcgatggctttaagaagtttaagaaagtttatgataaagataagtctaagttcttattgtataagtatgatcctagaactttctccgagttagaaagaatcataagcgactgtccagataaagttgaaaaagtacaaacaaatggaaaggtcaaggccgtggatgtaagtccatttgaaatgtatcgaagataccatggaatgattaagaaatattctaagaagggtaatggaccagccattaaacaacttaagtatcttgataagaagctcggttcacatattgatatcacaccagctaatgccaatggtaaacacgttatccttcaatcgttgaaaccttggagaaccgatgtttatttgaatcatgaaactggtgaatatgagattatgggaattaagtattctgatctgaagttcaataagaatgtgggatatggaattaagaaagataagtatttggaaattaagaaaaatgaggaagtatcggaaaaatctgagtttatgtttagtttatatcgtaaagatagagtcaggattcaaaatatgaaaactggtgaatcagtggaattattattctggtcaaggaatttttctaataaaaagtatgcagaattaaagccaatttttaaatttgtgacggaagatgatgattggccagtatatgggcatgcaaaaacacaaatattgaaacgattagtgccaaaagattgtaagatttggaaagtaaatacgactattctaggagatccatactacttagaaaaagaatccgataatccaaaagatatccttgattaa

SEQ ID NO: 318 - DNA, 4161 bp, Lactobacillus gasseri K7
atgaccaaaataaaaaatgaatatattgtgggcctggatatcgggactaattcgtgtggctgggtagcaatggattttcaaaatactattctacgaatgcatgggaaaactgctattggttctcatctatttgatgcaggaaattcagcagctgatcgtcgtgcttttagaacaacacggagaagaataaaaagaagaaaatggcgcttaaaactactagaagagatatttgatccgtatatgacggaagtagatccttatttttttgctcgtttaaaagaatctggtctttcacctttagataaaaggaaaaatgcatcttctatagtttttcctactgccttagaagataagaagttttattgcaattatccaactatatatcatttgcgttatgacttgatgagtgaagataagaaatttgacttaagagaaatttatcttgcaattcatcacattgtgaaatatcgcggtaattttttatacaatacacctgttaaagacttcgaagcttcaaaaatagatgtaaaagatagtttggagaaattaaatgagttatatgaaagattagactcagaatttactgtagagcttgatagtagtaatgcattagaaattgaaaaaattattcgagataagaatgtttttaagataaataaagttaagtcaattcatcaattactttctttaaaaactgagaataaggagcgtactaagttaataaaagatgtttctaagcaaataataaatgctattttaggttacaaaactaaatttgaaactattttgttaaaaaacattagtaaagatgaagcagacgactgggaatttaagcttactgatgtggatgcagataataagtttgaaaatctaattggggaccttaatgaaaatgaacaagaaattctgttagtaatcaggaatttggctaacgcaattactttaagtaacattgttgaagagggaaagactttatctgaatcaatgatcgataagtataataagcattcagatgatttgaaactattgaaacaagttatttcagatcatcctgatcgagataaggctaagaaattagccttggcttatgacttgtatgtcaacaatcgtcatggaaaacttcttcaggctaaagatgtcttgggaagtaagaaaactttatcaaaagaagatttttataaagaagttaaaaagaatctagatgattcaaaggcatcacaagaaattttagatgcaattgccttagattcatttatgccaaaacagaggacaaatgaaaatggtgtaattccatatcaacttcatcagcttgaattagatagaattattaaaaatcaaggaaagtactatccgtttttaaaagaggcaaatcctgtttcttcacatttaaagcaagcaccatataagcttgatgaactgattagatttagagttccttattatgtaggaccattaatttcaccaaacgaatctacaaaaaataaacaaacaaagaaaaatcaaaattttgcctggatgatacgtaaggagcaaggtcaaattactccttggaattttgatcaaaaagtagatcgaatggcgtcagcaaacaagttcattaaacgaatgacaactaaagatacttacttattaggtgaagatgttttaccagctaatagtttactttatcaaaagtttacagtattaaatgaacttaataacataaaaattaatggtaaaagaatatctgtgcctttaaaacaagaactatataataacttgtttaagaagaattcaacggtaactaccaataagcttaaatcctatttgaaagagaattataatcttattaatgttgaaattaagggattagcagatgaaaagaaatttaattctggattgacaacttataataaattaagaaatttgaagatttttgatcaacaaattgatgatcttaactatgataaagattttgaacggattatcgaatggtcaactatttttgaagataaggctatttataaagataaattgaaaactataaaatggctcagtgatagacaaattgataaactaagcaagattagaatgcaaggttggggtcaattatcgaaaaaattattatcacaattaactgataataatggtcaaactattattgaacaactttgggatagtcaaaataactttatgcaaattgtaaatcaggctgattttaaagatgctattgcagttgccaaccaaaatttattagttaataccagtgtagaagacattttaaatgaggcttatacgtcaccagctaataagaaagcaatccgccaagtcgttaaagtggttgatgacattgttaaagcggcctcaggaaaagttcctaaacaaatcgcaattgaatttactagagatgcagacgataaagctaaaataagtcaaactcgagcaaataaattgcgcaaagtttataaagaattatctaatgaattagcatcggaggctattagaaatgagttggaacgggttgctaaagatcaaaaattgttgaaagataaatattatttatactttatgcaacttggtagggatgcttatacgggtgaaccaattgatattgatgaactagaacaatatgatatagatcacattcttccacaaagctttattaaagatgattctctggaaaaccgagttttagttaaaaaagcagtaaataatggtaaatctgataatgtaccagttaaattatatggaaatcacatggcggctgacttaggaataacgattcgtcatatgtgggaaaaatggaaagatcaaggattaattactaagactaagtataataatttaattattgatccagataagataaataaatatgaatcttcaggcttcatacatagacaactggttgaaacgagtcaaattattaaattagcttcaacgattttgcaatctaagtatcctgatactgaaataatagttgttaaagcgcgatataatcattatttgcgaaagcatttgaatttatataagagtagagaagtcaacgattatcatcatgctattgatgcgtatctttcagctatttgtggtaatcttctttatcaggtttatccttatttacgtcctttctttgtatatggacaatataaaaaatttagttctgatcctaaaaaagaaaagataatttatgataaaacaagaaaatataattttatttcgcaaatttttgaaaacaagggtaacgatattatcagtcttgaaactaagaaaaaggtttttgataaaaaagatataattgaaaaattgaaacatgcatatgattataaatacatgcttgtttctcgagaaactgaaactcgcgatcaggaaatgtttaagatgactgtttatccgcgtttatcgcgtgatacaaaaaaatcacgtaatctaattcctaaaaagaaagatatgcctactgaaatatatggcggatatacaaataattccgatgcttatatggttattgctaggattaataagaaaaaggaaaccgaatatcgcgtgttcggagtaccaatgcgtgaattagttaatttaagaaaagctgagaaaaaaggtcactataatgcttatttgaagcaggtgcttgaacctgaaattatgtataacaaaaatggaaagaaaaataaaacaattagttcatttgaaattgttaaatcaaaagttccatataagcaagtaattttagatggtgacaagaagtttatgcttggaagttcaacatatgtatataatgctaagcaattaactttatctcaagatgctatgcaagcaattacagataattgtgaaaatgatacggatgaagagaaagctttgattgaagcatatgatgaaattcttacaaatattgataaatatttaccattatttgatattaataaatttagagataaattacatgctggaagagaaaaatttattaatttatcgttagatgtgaaaaaagatacaattttgcaggtgttgaatggattacatgataatgctgtaatgcctaaaattaagtctttaggattatctacggaattgggaaaattacagattcctacaggtgtaaaattatctgagaatgcaaaattaatttatcaatctccaacaggtctatttgaaaaacgcgttaagatttcagatttgtaa

SEQ ID NO: 319 - DNA, 4111 bp, Lactobacillus graminis DSM 20719
atgtatgaaacgttcgtataatattggtctagatattgggaccaattcaattggctgggcgattgttgatgatcaaagtaaactaatcagtgttaaaggaaaatatggttatggggttcgcttatatgatgaaggccaaaccgctgctgagcgccgtagtttcagaacaacacggcggcgcttaaagcggcgtaagtggcgcttgggattattaagagaaatctttgaaccctatatcacgccgattgatagcacttttttcttacggcaaaagcaatcaaatttaagtcccaaagatcagcgtaaattatatccgcaaacgagtttatttaatgatcgtccggatgccgatttttatcagcaatatccgacaatttaccacttgcgatatcagttgatgactgaaaagcgccagtttgatattcgtgagatttatttagcgatgcaccatattgtgaagtatcgggggcacttcttgaacgaagcgccggttgcctcatttaaaagtagcgaaattaatttagcagagcattttgatcagttaaataccatttttgctgacttatttagggagtccggctttcaattagagactgatgaattggtagcggttaaggcccttctaatggataatcaacaaagtgctagcaatcgccaacgcaaagcgttaccaaagctatacacgccaagtgcggataagtcgattgagaagcaacgtaaagccattgcaactgaaatattaaaagccatcttaggattaaaggcgaagtttaatgtggttactgggattgaagctgaagatgttaaagcatgggcattgacttttaacgctgaaaattttgatgaagaattggctaagctcgaaagtagtctcgatgacaatggccacgaagttattggtatcttacaggaactttattcgggaatcttactggccggaattgtccccgaaaaccagtcattgtcacaagcgatgatcacaaaatatgaagaacatcaagcacatttaaaaatgctaaaagcagtgcgagatgatctagcaacagcagatcaacaaaaactaaagaaggcttatgatcagtatatcgatggtcaagaaaatacgaaggcctattcgaaggaagctttttatgacgacgtcacaaaagccttaaaggattattcagaacaaccgctcgtgagtgaaattcaaaaattaattgagcttgatcaatttatgcctaaacaacggaccaaagataatggggcgattccacaccagttacatcaacaggaattagaccggattatcgagaaccaacagcaatattatccatggttggcagaactcaatcccaatccgaagcgccaaaccgttgctaagtacaaattagatgaattagtggcatttagggtaccgtattacgttgggccgctcattacagctgagcaacaacaacaaagttcaaatgccaaatttgcatggatgattcgtaagactgaaggccgcattacaccatggaacttcgatgataaagtggaccggcaagcatcggcgaatgagtttattaagcgcatgacaaccactgacacttatttattggccgaagatgtattaccaaagcaaagcttaatttatcaacggtttgaagtattaaacgaattaaatgggcttaaaattgatgaccaaccgattactaatgagcttaaacaagcaatcttcaatgatttatttatgcaaaagacaagtgtatcagtgaaaaacattcaggattacttggtatcagagaagcgctatgcaagtcgccccgcaattactggtctatctgatgagaaaaaattcaatagtcgattaagtacgtatcatgacttaaaggtgattgttggggatgcggttgatgatgttgataaacaagctgatttggaaaaatgcattgaatggtcaacgatttttgaagacggtaaaatttatagtgctaaattgaatgagattacatggttaacagaacaacaacgggggcaactagctactaaacgctaccgcggttggggtcgcttgtcggctaaattattaacgcaaattgttaatgcaaatggacaacgcatcatggatttactctgggatacaaccgacaacttcatgcggattgttcactttgaggactttgacaagttaattactgaagccaatcaaatggtgttagctgaaaatgatgtgcaagatgtcatcaatgatttatatacgtcaccacagaataaaaaagcgctccgccaaattctacttgtggtcaatgacattcaaaaagccatgaaagggcaagcaccagaaagaatattgattgaatttgcgcggggggcacagaaagataaaagtttgacagttcggcgtaaaagaaagctagatgagatgtatagccaaataagcgatgctgtacttgcagatgaaagtgttcggcaagaactgaaaagtagtaatcaagatgacttagttaaagagaaagtgtacttatacttcatgcaaggaggacgagatttatataccgggaatgcattaaatattgatcgtttgtcggactatcatgtcgatcatattattccccaggcttacattaaggatgattccttggataataaggcgctagtatcatctagaatgaatgagattaaagccgatcgagttcctcttcaggtagttcagaagcaatttggcaaaaatatggcttctgaatggggctacatgcatcgagcaggattaattagtcggaaaaaatatgataatttaatgttcaatcctgaaaacctaaataagtatcagattaatcgttttattagccgtcaactggtagaaacccaacaagttatcaaattggtagcaaacttattgagtaaccagtatgaaggtgataatgtcaaaatcattacagtcaagagcaagttaacacagacgatacgttctgaatttgattttcctaaaaaccgagaggtcaataattatcatcatgcttttgatgcttatttaacagcttttgtggggatgtatttattgaaacgctatccaaaactaagttcatactttacttatggcgaatatttaaaaggaaatcaacaggataagtggagtagctttaatttcttaaatgatttaaagagggctaaattagaagataaaactaataaggaaatcttttggcataaagaatccggcctagcttacttgaataaaatttatcagtttaagaagattttagtgacccgcgaagtgcatgaaaattcaggagcattatttaatcaaacactctatgcggctaaagatgataaagccagtggtcagggcgggaagcaattgattcctgctaaacaagcccgaccaactgcgctctatggtggatactcagggaagactgttgcctacatgtgtatcgtacgcattaaaaataaaaagggtgatctctataaagtctgtggtgttgagacaagttggctagcacaacttaaacaactgaaagatgaagactcacaaaaagcattcttaaagcaaaaaattagtccgcaatttacaaaagcgaagaaacaaaaaggaacgattgtgaaagtagtcgaagactttgaagttatcgcaccacacatcttaattaatcaacggctctttgataatggtcaggaattgacattgggttctgcgacgtataaacacaatgagcaggaactgattctcgacaaaacagccgtcaaattgttaaatggtgaattgccattagcgcagtctgaagaacttgctgaactagtttatgatgagattttagatcaagtgatgcactacttcccattgtatgatacaaatcaatttagagctaaattattagcgggtaaaacggccttcatgcagttaccatggaagagtaatcctgatgataataagacagtacagattactcagccgatagtgttgaaaaaaattctacaaggactgcatgctgatgcgggacgtgtatcgttaaaagaattgggaatgaccactgattttggaatgttgcagaaggctactggtattacattcacacctgacacccaaattatctatcaatctccaaccggtttattcgaacgacgagtagctttaagggatttataa

SEQ ID NO: 320 - DNA, 4152 bp, Lactobacillus hammesii DSM 16381
ctgctggaagactttctagtgggtgtagaagtgtttcatagaaaaataggaggcgttatcgccatgaatcaggaaccatatgcgattggattagatattgggaccagctctttgggttgggctaatgcagacatggatggttatattgcccgagtgaagggacaaaccggattgggagtccgtctattcgaagaaggacagcccgccgcggatcgtcgaagctttagaacgacacgtagacgtttgagccgccgccgttggcgtttacggttattacgtgaaatttttgatgagccaatttcatccatcgatcctaacttctttgcgcgtcagaaggcatcgagtatttcgcctaaggatgatcgatttgagacaacttatcaattgtttaatgataaaactgatcaagagttttattcaaagtatccaaccatctatcatttgcgatgggcgctgatgacggagcatcgcaaatttgatttaagagaaatttacttagctgtacatcacattgttaagtaccgtgggaattttctgcgttctggaaaccccaaaagttttaagccaagtgaattagatttttcacaacggtttaaagaggttaacggactatggcatcttatctttgatgaggtggcaccacagttgcctacggacaacttggaagaaattacgaaactggtattagatacaacgcgcactcgagccgatcgtcagcgagagtcggttaagctgttaatggcggcgacagataatcataaggactggaagccgtatctaactgaatttactaaagcaattttaggcttgaaaacgaaactgtatctacttacaggagttgacgttgcaaaagcggatcaaaaaacttggacgtttagtttagaggacattgaagatcatcgggcagatttagaaacggcatttgatgaccggagtctggaattaattgaaaagttagttgatttacaagcagcaattcaactgactgaaattatgcccagcggacagtacttctcacagagtatgatatatcgatatgatcaacataaggaacatttacggtggttaaaggattatgcagaacagcaaacagatgctaataaaaggaaggctgtccggctagcttatgaccactacatcgagggagatgccaaaggaaagcctgaaattgctgatgacttttataaggaactgaatcgaatcctgaaaggcgacacgtcagaactcgctaaaaaaatcaatcatgagatcgcgttggagcattttatgcctaaacagcgaacaaaagaaaatggtgttattccctaccaaattcatcaacaagagctagactcgattattgataatcaaaagaaatattatcaatttttaggagaagataatccggtggtatctcatcatgggtcacagccatataaaattgatgagctagtgagtttccgggtcccctattatgttggccctatgatcacggcagaccagcagaaaaagacggcagcaggacaatttgcatggatggttcgtaaagacagtggtgatattacgccctggaactttgatgataaagttgaccggaccgcttcagcaacaaactttattcaacggatgaaaaccacggatacttatctgattggggaggacgtgttaccactacagagtctgacttatcagaagttcatggttctcaatgaattgaataatatccgaatcaatggcgaattgctgactcgtgagcagaagcagcgaacctataacgatgtcttcaaaggtcatggaacagtcaacgtaaaatccttaattaagagtttagaatgtcacagtgaggtcactggtgcgatcaaggtggaagggctagctgatcctaaacgttttaatagtgcgttaaccacatatcgtgactttaagaaaatcttaccagtagcgattgatcaaccgcaacgtcaggcggatatcgaaaggataattaattggtcaacgatttttgaagatgccgatatcttcaaagcgaaactacaagagatcgattggctgacagatacgcaacgtgatcgcctcagtactaagcgttatcgtggctggggacgtttgtcagccaaactattattgaatattaaggatacgcaaggtttatcaattatggaccagctatggaatacgcaacataatttcatgcaaattgtacatgagccagattatgcagagaagattgaaaagacgaatgccaaggggctgaaacaacaagatatatttgaaacaatcaacgaaatgtacacatcaccacaaaacaaaaaagctttgcgtcaaatcttagcagttgttcgtgatattcaaaaagcccatcacggtcaggcgcctagtcgaatctttattgaagcggcgcgaggagcagagcagaatcctcagcgaacgcggcaacgtcagaaacaattggcagatttatttgctgatcaagctaaagaaattgtcaatgaaacagtagctcaggagttgaatgatgagactgacaacaaggcacgattcacggaccgactcatgttgtatttcctacaaaatggtcaggatatgtatacaggagaaaaactgaatattgataaattatcgacctacgatattgatcacattttaccgcagtcgttagttaaggatgattcgttagataatcgtgtgttggttagcaaggtagagaatcttaaaaaaaatgatcattttgcctcagagctttatgccagaaaaatgcaaggaacatgggaactatggcggtcagcagggctaattagtgcgcggaagctgaaacatttattaatgcggcctgatgaaattaataaatatgctaccggatttatcagaagacagctggtcgaaacccgccaagtcatcaaattagtcacggatgtattgagtaatgaatatgattcagacaaaactaagattatttcagttaaggcgggactttctcaccagctacgaatggagctggacttgccgaaagttcgggagttgaatgactatcatcatgcttttgatgcctttttggcagttcgaattggaacctacttactaaaacgttatcccaagttggaacgtttctttgtttacggtcaatatcaggtagcgccacaattggacttacgccgttttaatttcattcatgacttggtttccggaaaacaagagaagatagttgccgaggagaccggcgaaattgtgtggaatcgtgagaaagatgtttcttacatgaaacatcttttgagcttgaaacatttgctggtgacacatgaagttaaggaagatcatggggccttgttcaatcaaaccatctataaggcaaaaaaggataatggcaatgttggcggtaagatgaagctacttcctactaaaagtaatcgaccgacagaaatttatggcggacattctagccaagcaatagcttatttagcaattgtcagagttaatggcaaggaaccttcgtacagagttatgggagttccaattaggattctcgatcagctgaagcaagctaagaagcagggagaatatgctgaaaggttagcgttaaagcagttctttacaccggactttactaaaggtaaaggaaaaattgtttcggactttgacgtagttattccacatattcccctgttacagcccgtgatagatgagatttcaggacagtcacataggtttgctttagggactaatacctattatcgaaatttacagcaattgattttaacgcttgctgatcaaaaggtattaatttcaaaagagacaggagtggatgaagagaagaagctcgtagaagtctattctcacatttgtcagcaagttatgaagtttttcccgttatacgatcggaataaatttagggaactacttgtagacagtcgatcccatttcgaacaattaccaattgttaatcgttattcagatgctgggaaactagagatagctggcaagcggggcattttacaacagataatggttggattgcatgccaacgcgacgcctggggatttgaaagaactaggcgtaaaaacgccttttggaaagctacaagttccaggcggcattaaattaactgagaatgctaagctgatttatgaatcgccgacaggcttgtttaaacgggaggtgaagataactaccgagtaa

SEQ ID NO: 321 - DNA, 4161 bp, Lactobacillus hominis CRBIP
atgacaaaaataaccgaagactatattgtgggcctggatatcgggactaattcttgtggctgggtagcaatggattcaaaaaatactattctgcgaatgcatggaaaaactgctattgggtctcacttatttgatgcaggaaattcggcagctgatcgtcgggcttttcgaacaacacggagaagaattaaaagaagaaagtggcgattaaagttattagaagagatatttgattctcatttggcaaaagttgatccatacttttttgctcgtttaaaagagtctggtctctcacctttagatacaagaaaaaatgtatcttcaataatttatccaacatctcttgaagataagaagttttatgttgataatcctactatttatcatcttcgttacaagttgatgactgaagatcgaaaatttgatttaagagaagtttatcttgcaattcaccatattgtgaaataccgcggtaattttttatataatacgcctgttaaagcctttgaagcttcaaaaatagatgtaaaaggtagcttaaagaaattaaatgagttatatgaaggattagactcagaatttaatgtagaacttgatagcaataatgcattagaaattgaaaatattattcgagataagaaaatcttcaagataaataaagttaaggaaattaaccaattactttctttaaaaactgaggataaggaacgtactaagttaatgaaggatgtttctaagcaaatagtaaatgctattttaggttataaaactaaatttgaaactattttattaaaagatgtaagtaaagatgaagcagacgattgggagtttaagcttactgatgtggatgcagataataagtttgaaaatctaattggggatcttaatgaaaatgaacaagaaattctgttagtaattaggaaattggctaatgcaattactttaagtaacattgtcgaagagggaaagactttatctgaatcaatgaaggataagtataagaaacattcagatgatttgaaattattaaaacaagttatttctgatcatcctgatcgagataaggctaagaaattagctttggcttatgacttgtatgttaataatcgacatggaaaaattcttcaagctaaagatatattagaaaagaagaaaactttatcaaaagaagatttttataaagaaattaaaaagaatctagatgattcaaaggaatcacaggaaattttagatgcaatttccttagattcattcatgccaaaacagagaacaaatgagaatggggtaattccatatcagcttcatcagcttgaattagacaaaattattgaaaatcagggaaagtactatccgtttttgaaagaggtaaatcccgtttcttcacatttaaagcaagcaccatataagcttgatgaactaattaggtttagagttccttattatgtaggaccattaatttcaccaaacgaatctactaaaaataaacaaacaaagaaaaatcaaaattttgcttggatgatacgtaaggagcaaggacagattactccttggaattttgatcaaaaggtagatcgaatggcgtcagcaaacaagttcattaaacgaatgacaactatagatacttacttattaggtgaggatgttttaccagctaatagtttactttatcaaaagtttacagtattaaatgaacttaataacgtaaaaattaatggtaaacgaatatctgtgcctttaaaacaagaactatataataacttgtttaagaagaattcaactgtaactactaataagcttaaatcctatttgaaagaaaattataaacttattaaagttgagattaagggcttatctgatgaaaagaaatttaattctggattgacaacttataataaattaaaaaatttgaagatttttgatcaacaaattgatgatcctaactataataaagatttcgaacggatcatcgaatggtcaactatttttgaagataaggctatttataaagaaaagttgaaaactatagactggctaagtgatagacaaattgacaaactaagcaagattagaatgcaaggttggggtcaattatcgaagaaattattatcacaattaactgacaataatggtcaaactattattgagcaactttgggatagtcaaaacaattttatgcaaattgtaaatcaagctgattttaaagatgctattgcagttgctaaccaaaacttactagttgatacaagtgtagaagatattttaaatgaggcttatacgtcaccagctaataagaaagcaatccgccaagtagttaaagtggttgatgatattgttaaagcaacttcaggaaaagttcctaagcagatcgcaattgaatttaccagagatgcagacgataatgctaaaataagccaaagtcgagcaaataaattgcgtaaagtctataaagaaatgtctaacgaattagcgtcagaaactatcagaaatgaattggaacgggttgctaaagatcaaaaattgctaaaagataagcactatttatactttatgcaacttggtagggatgcttatacgggtgaactaattgatattgataatctagaacaatatgatatagatcacgttcttccacagagctttattaaagatgattccttggaaaaccgagttttagtaaaaaaagcagtaaataatggcaaatcggataatgtaccagttaaattatatggaaatcgtatggcaactgacttaggaatgacgattcgtcatatgtgggaaaaatggaaagagcaaggattaattacgaagactaagtataataatttaattattgatccagataagattaataaatatgaatcttcaggcttcatacacagacaactagttgaaacgagtcaaattattaagttagtttcaacaattttacaatctaagtatcctgatactgaaataatagttgttaaggcgcgatataatcattatttacgaaagcgcttgaacttatataagagcagagaagtaaatgattatcatcatgcaattgatgcatatctttcagctatttgtggtaatcttctttatcaggtttatccttatttacgtcctttctttgtatatggacaatataaaaaatttagttccgaacctgaaaaagaaaagataatttatgataaaacaaggagatataattttatttcgcaaatttttgaaaataaggataacgatattatcagtcgtgaaactaagaaaaaggtttttgataaaaaagatataattgaaaaattgaaacgtgcatataactataaatacatgcttgtttctcgagaaaccgaaactcacgatcaggaaatgtttaagatgacggtctatccacgtttatcacgtgatacaaagaaatcacgtaatttaattcctaaaaagaaagatatgcctactgaaatatatggcggatatacaaataattccgatgcctatatgattattgctagaattaataagaaaaagggccccgaatatcgcgtgttcggagtaccaatgcgtgaattggttaatttaagaaaagctgagaaaaatggtcactataaggcttatttaaagcaggtacttgaacctgaaattatgtatagcaagaatggaaagaaaaataaaacaattagttcatttgagattgttaaagcaaaagttccatataagcaagtaattttagatggtgacaaaaagtttatgcttgcaagttctacgtatgtccaaaatgctaagcaattaactttatctcaatattctatgcaagcaattactgataattgtgaaaatgataccgaagaggagaaagctttggttgaagcatatgatgaaattcttacaaatattgataaatacttaccattgtttgatattaataaatttagagaaaaattacatgctggaagagaaaaatttgttgatctaccattagctgagaaaaaagagacaattttacaggtattaaatggattacatgataatgctgtaatgcctaagattaagtctttaggattatctacgccattaggctttatgcaatttcatactggcgtatcactttctgaaaatgcaaaattaatttatcaatctccaacaggtttatttgaaaaacgccttaagatttcagatttgtaa

SEQ ID NO: 322 - DNA, 3900 bp, Lactobacillus hordei DSM 19519A
aaatggcgtttaggccttttggaggaaatatttgcaccatacttagcacagggggatccatattttttagcacgtatgaaggaatcaaatatttcaccacgagatgaacgcaaaaagtattatggttcactacttttttctgatgataccgttttttatgataaatatccaacagtttatcatttgagacatgccttaatgacagaggatagaaagtttgatattagagaaatttatttggctgtgcatcatattattaaatatcgaggaaacttcttaattaatactttgataaatgaattttcttccaaagcagttgattttaagaaagatgctgatatattaaacgatttatttgagcaattttatatttctgatattaacgattcttttcaattgaatactgctgacatgaatgaaattagtgaattattacttgataactccaaaactagacttgaccgtcagcgtgaaagtttaaaaaaactagcaaaaaaggtagatgatatatctgtcgctaaaaagcatcaaaaaattgcaacggaattcagtaaggcaattctgggaaataaagctaaatttgatgtcattttaaatgttactacagatagttcgaatgattggtcttttaagttagaagatgaggatgcagacgaaaaaatcgtcgttttgctggaagaattaaataccccacagcaggaagctttgaatattattcatcaatggtattcacagatttccttgaacggaattgttcccgatggaaaatcgatttcagaagcaatgattagtagctatgaactacataaagagcatctagcacttttaaaacagcagattaataatactaaagataaaaagaaagcacatggtttacatgaggcatataacgaatatgtacatggaaataataacaagaaactaaatcaagcagatttttattctaaggttaagcaaaatctagaatcatctttgattacggatgaaattctagaattgattaatgctgagaattttatgcctaaacagcgaacatctgctaatggtgtgatcccacatcagttacatcagcaagaattagacagaattattcaaaatcaagcaaagtactatccgtttttggcagaaactaatccgaatgaaaaacggagtaaggttgcaaagtataaattggatgagttagtagcctttcgtgtgccatattacgttggaccgcttattacagcaactgaccaaaagaaaacttcagggaaagaatttgcttggatggtacgtaaacagcctggtagaatcacaccatggaattttgatgagaaagttaacaaaatggagtcagcaaatacttttattcgacgtatgacaacaaaagacagttatctaattgcagaagatgttttacctgatgaaagccttctttaccagaagtttaaagtgttgaatgaattaaataacttgcgagctgatgggcgtaaactaaaagtttctgttaagcagaaagtttttaaagagttatttcagcaacaaaaaactattacaatagttaagttacaaaattatttaaaagctgagtgcagctttttaactactcctgagattagtggcttatcaaaaccagagcattttgtctccagtctagcgacctatattgatttaaaaaaaatttttggcgaagatattgataatcctgctagacaaaatgactttgaacgtatgattgaatgggcaactatttttgaagacaaaaatatttacagtgaaaaattaaatgaaattaaatggttaaacgataggcaaaaaaaagaattaaaaaataaaaattaccatggttggggtaaattatcagccaagctacttaaaggcttaagagattctgatgaatgctcaattattgagcatatgtggaatactcaacaaaactttatgcaagttcaagctgaagaagatttcgcacaacgaattcaagaagaaaataatcagcatttaaaaggaaatactttagaagaagttttggcagatgcctatacatctccgcaaaataaaaaagctattcgacaagtagttaaagttattgaagatattcaaaaagctatgggcggaatagctccgcaaaaaatatcaattgaatttactagagcgcccgaagaaaaaccgcgtcgttctgtcgagcgacagcagcaaattgaaaaaatttataaaagcgttgcaaatgaggtcgagaacgctggagtaaaggatgagttacaacgtttttctgacagaaaacagactttaactgataaatatttcttgtactttacccagcttggcaaagatatgtatactggtaagtcaattaacattgatcagattggtaattatcaaattgaccatattctaccgcaagcatttattaaagatgattcgcttgataatcgtgttttagtgagtgcagccgtaaataatggcaaatctgataatgttcccacaaaaaatgataggtataaagtgcgagaacatgggcaaagactgtatgatcaggggttgatatccaaacgaaaatttaataatttgataactgatcctgattctattaataaatttactgcaagaggatttgttaaacgacaattggttgaaacaagccaagttatccgactagttgctgagtttttgtataacaaatatcagagtaaaagtgagatcattgaagttcgagctaaaatgaattcacagttacgtaaggattttggattaatcaaaaaccgaaatgtcaatgattatcatcatgccttggacgcctatttaactacctttatcggaaattatctttatcggcgttatccaaaattgcgtgcatatttcacttatggatgctttaaaaaggttgatgattcccaattaaagtattttaattttttgcatgatatagaagatgataagaaaaagatcattaaggataatgatacaggagaaattctctggcatcgtgatgaaggaattgcacgatttaaaagaatttataattttaaatatatgctggtaacgcatgaagttttgactagacaaggtgcgatgtttaagcaaactgtatactcggccgcagtagcaggaagcaaaaaattgattcctgttaaagaggatcgaccaattgatatttatggaggatacaccaataataatgatgcttttctggcaatcgttaaagttactaagaaaaagcaatatatggtagttggtataccacaaagagcagtagttaaactgaatgatgccgcaaagcaaggtagtaaagcataccaaaaagttttatacaatgttataaaaccacaatttattaagaaaaagaaagatagaaaaaccggtaaaattacacaaaagttagagaattttgaaatcgtggtttccaaaactctatatcgacagctgattattgatggtgatcagaaatatatgttgggaagttcagcgtataaatataatgctaagcaactggtcttatctgagtatgcattggaagttttagatagaagtatttttgaaaaaaaagaatacacaactgttgatttagataatgtttacgatgaaattcttgcacaggtagacaaatatttttctttatatgacaaaaataaatttcgccagaaattacatgaaagtagaaagatttttactgaattaccaataaataatttattctcaggaacaaaattattaaaaagcggcaaacgtgagacgttgaatgaaatattggaaggattgcatgcaaatgcaactaagaaagatttaaaaagccttaaattttctacaccacttggaatgatacagtatccaagtgggattatactttcggaaaacgcaattctatgttatcaatctccaacaggaatttttgagcgaagagtgacacttaaagatttgtag

SEQ ID NO: 323 - DNA, 3513 bp, Lactobacillus hordei DSM 19519B
atgtcaaagtataatgtaggattggatataggtattgcatctgttgggtggtcaattgttgatgctgacaaaaagaaaattattgatttaggtagtcgtatattttcatcaggaaatgcagcggctaatcaagagcgacgtggttttaggggaacaagacggttgattagaaggcgaaaaaatagattaacagatgtaataaatttttttggagaaaaaaagtttatagatactaaagttgtagataaaaatggacatgtacattataaattttcagtaaataatacagaaagtccctatgaattacgtgttaaagggttatctgaaatattaacaaagcaagaacttgttattgcactttaccatattgtcaaacatcgagggatctcttatgatttaggcgatttggaagatgatggaacaagtggagtgaccgattataagacctcaattaatattaatcgacaattgttaaatgaaaaaacagttggccaaatacaactagaaaggctaaatgagtttggtaaagtccgaggacaggtagaagaaaatgaaaatgtaacattgctcaatgtttttccttcagcggcatatgtcaaagaagctacacaaattttaacgaagcaaagagaattttatccagaaattacggatgactttattgcaaagttcatgctgtttattactcgtaagcgtgattactttgttggacctggaaatgaaaagtcccgtacagattatggaatttataaaaaggatggccgaacactagacaatctttttgatgagctcataggaatagataagataaatggagagaaaagggcgtcagcatcaagtttgacagcgcagatatataatatgttaaacgacctgaataatttaacagtaccgaatactgaagatggaaggttaacaattcaaaccaaaaaagaaattcttgaagcagctaaaactacgaatggtttgtttggaatagctcaaatttgcaaaattataggttgtaaaaaggatgatattaaaggttttcgaattgataagtctgaaaagaaaattatgcatactctttctggttatcgaaaatttcgtaaagaacttgctgatgttaatatagaagcaaatgatttgaatattaatttagttaacaaaattgctgatatcctgacacttaatacagaaaaagctgaaattcgcaaacaattagacaaaagtaatatggatatctccaatgaaatgaaagagattgttattaataaaaataaggagtttttagtagatggtcgagcaacatggcatagtttctcctataaaacacttaatttacttataccggaattattaaatacacctgaagaacaaatgactattttgacacgcttaggtcttgtaaaacctaacaataaaaaatatgaaggcctgaagaatattcctgcacggagaattacagaagaaatatacaatccggtagttgctagagctactcgtgaagctgttaatgtttttaatgcaattaccaagaaagtaggacgtgacaatattaaggatgttattattgaattaccacgtgaagataacgaagtagacatcaaaaagggcattgtcaaaagacagaaacaaaatgaagtagaaaaagagacggctgatgcattagttaagcaacatatgacaatatcagatagtgcattaattgcacagtatcgtaaaattagaggactatcgcaaaaagtacggtattggtatcaacaggatacgatttgcccttattgcggtaagaaaattgaggctgttcaattaatcaataataatgatagttttgaagttgatcatattgtaccaatctcagttagttttgatgactctcaaaataataaagtcctggtacatagtcagtgtaatcaagcaaaagaaaaacaaacaccacttggttggttaaataatggtggtgggtttggtcaaagtaaagctgactatattgctagagtgaagtcaaataaaaattatgcaaaaaataagattgataatttgttgaatgagacagatcttaatgacattgctacacagcggggctttattcaacgtaatcttaatgatacgcgttatgcctcacgtattgtactcaatgaattttactctttttttcgatctaataacttgagtacaaaggttaaagtggttcgtggaaaatggacatcacagatgcgcaagaagtggaatggagtaggtggactatctaaaacgcgtgatacataccatcatcatgcaatcgatgcttgcattattgcatgtttcccattattaaaggcatttgataaggctataaagttaattgatgttgacggagaaactggggaaatactacaagataaaaaagcaataaaattggcacaggaagcagagatagtagaaaaaatatctgttattaaaaataaaaagttcgagaatatggttaatgagatttataattttccgctttttaaacaggtggaattagcaaatgatatcaccaatttggaaaatcctgtaaagttcagtcatcatgttgataagaaagctaatcgtgcagttgcaaatcagacaatttatggaacacgtattaaagaaaaagaagtaactaagcgtggaaaaaaggaaaaaatacaagaaagatatacgttaggtacaattaaaaatatctatgatattgatggctttatgaattttaaaaaattgtacgataaaataagtaaaaatgatgatgtgaagtttttaatgcagaaaaatgatccgaaaacatgggaaaaattgattgatatatttaattcttatcctgattcagaagaagttactcaagtggatggaaaagttaaaagagttgcagtttctccatttaaactttactatcgtgagaatggttttatcactaagtattctaaacataatgatgggcccaaggtggtaagtataaagtattatgattcaaaggtggggagtcacattgatattacacccaaagatgcgagaaataaggttattttacagagcttgaagccatggagaacagatgtctattttaattcaataactcaacaatatgagttacttgggttaaaatattcggatttaaaattcacaaatggtgtttacgggataactagagatgcatatgagaaattaaaacatggtgtaagcgaagatggtgtaacagcatggaagcctattagtaaaaatagtgaatttagatttagcttgtatcgaaatgatcgagtaagggtcattgatgaaaagggtgactcaatcgaattattatttgcttctagaacaacaagtaacgagggctatgttgaactgaaaccaatttataaagctaaatttgatagtaaagaagaagttggtttttacggacttgtttcaaacggacgactcattaagaaaatgagcaagggagggtataaactttataaagtaaatacagatattcttgggaaaccatattatgttacaagagaatcagatgagccaaagttaagtttgtag

SEQ ID NO: 324 - DNA, 4188 bp, Lactobacillus jensenii DSM 20557
atgaaagaaataaaagactacatcattggtctcgatatcgggacaaactcatgtggttacgtagtaacagataaacaaaataatattttgaagctaaaggggaagactgctatcggcgcacgcctttttaaagaagggcaagctgcagctgatagacgttcttttagaactactagaagaagattagcaagacgtcactggagattaggtttacttgaagaaatctttgatccagaaatggaaaaaatagatcctaatttttttagaagattaaaagaatcagactattctcctaaagatagtcgtaagcaatttaatgcaattgtttttaaaagtataaaagctgacaagagattttataaaaaatatccaactatttaccacttacgtaatgctttgatgcatgataatcaaaaacatgatttacgcgaaatatttatggctgttcaccatattgttaaatatcgcgggaactttttaagagaagattcagttaatgcttttaaagcagctaagttttctttgcgtggtgaagatgggattggacctgttgataaattaaatgatttgttgaaagaaatttattctgaatattcaccagaacttgcaactaataatttatctaagattgaagatattattaaagataaaaacttatataagcaagacaagcttaaacaagtagcgactttgttaattaaagaagctgattcaaaggataaagctaagcttaataaagatattgctaaacaagttgctaactcttttatgggctatatgtttagattagatacactctttagtcttactgatgttgatgtgaaggactataaattaaaatttagcgatgctaatattgatgaatctttggatgatttgactagtttattgacagatgcacaaatagaatttgtattagaactgcaaagcatttataatactatagttttaaatgagattgttccagatggaatgagtctttctgaatcgatgattaagaaatatgatgatcataaggaagacttgaaaatatttaaagaatatattgattctttaagtgatcagaaaaaagctaaaaaactgctatcagcctataatttatatgttaattatcgtaaatctgatttagtagaagctaagaatttgtttaaaaataagaaggtaggggacaaaaattttgccgatgtaataagcaacttcgaagtatttggcaaatttgtttctgataatttagatgattcagaattagctaataagattaaggctagacttgatttaggtgaatttttaccaaaacaaagaaccaatcaaaatggagtgattccatatcaattgcatcaagttgaattgacgcaaatacttgaaaaacagggaaagtattatccattcttgattacacctaatcctgtagaaagtcatagaaataatgctccttatgaaattagtgaacttgtatcattccgggtgccttattatgttggaccattaattgataatcaaagtattaaagataaacaaaataaaaataagtttgcctggatggtacgtcaaaagcaaggtcaaataacgccttggaatttggaagaaatggttgatactacagaatcagctaatcaatttatcaagagaatgacaaggaaggatacgtatttattagctgaagatgttttaccaaaatctagtttagtttatcaaaaatttatgatattagatgaattaaatagaataaaaattgacggcaaaaaattaacaagtgaactaaagcatgatatttttgaaaaattatttaagaagcaaaaaagcatcaatttagataacttaaagaattatttattagtagagggcaatattccaggtttgattgagggcctttctgatggaattaattttaacaatagtttttcaacttatattgattatcgtaatatctttggtgatgagattgataatcctaataagcaagctgacttcgaaaagatgattgaatggtcaactgtgtttgaagaccgtaagattttcaagcggaagctaaaagaaattacttggctaacatctgaacaaattaaacaagtaagtagtaaacgctattcaggatgggggagattatctaagaagttattaactcaaattacggatgaaaatggtgttaatatcttgcaaagactctggaatgaacctgaaactttaactgaagttttagctaatccggttataaaaagaaaaattgtagaagctaatagttcctttactaaagcgaaagatatgaaagatatcttggttgaagcatatacttctccacagaataaaaaggcaattcgtcaagttatgcgagtagttgatgatattattgccgctgctcatggtaaaaagcctagtcaaattgctattgaattcgctcgtgaagatcaagataatccacaaatgactaagtcacgtaaggctcaacttgatcagatatatgccaagattagcgatgagtttttagatgatgcggttaaaaatgaactaaagaatatgaaagataataagcctttggctaaggacaaggtgttcttgtactttaagcaaatgggtagggatgcctatagtggtgaaaaattatctttagataacttgcaagattatgatattgatcatatttatccacaatcatttattaaagatgattcctttgataacagagtacttgttcaaagagcttataacaacggtaaatctgataatgtgccagtactcttatttggaaataaaatagctgcaggtttgggaattactattcgtcaaatgtggaagaaatggcttgaacttggacttattagtaaacgtaaatttaataacttgattacagatccagaaaagatttctcgaaatatggcttcaggattcgtaaaccggcaattagtagaaactagtcaagttattaagttagttgctaatattttgcaggctaagttacctgatactgagattattgaagtaaaagctagctacaattctatcttgcgtaaggaatttaacttatacaagagtcgtgaagttaatgattatcaccatgctattgacgcatacttaactacgattgttggtaattacttgtatcaagtctatccaaaacttagaccatactttgtatatggacaatttaagaagtttggcaaagctgaaaatcaagaagatgatccagttaagaaaattaagaaattcaactttatttatcagttgatttggggtaaggatgatgcaatttgcattagccataccaatcaacaagtctttagtaaaaaagatattattgacaaattaactactgcatataacttcaagtatatgaatatatcacatgcagtttacacccgtaataataatatgtttaaacaaacgcttttcccaattattgaacgtactacggctaaaaccaaaagtttgattcctaagaagcttgatcgaccaactgatatttatggtggatatagtaataataatgatgcataccttgcattagtcaaagtagataaaaagagggggtcagaatatcgcgttgttggtattccgatgagagctgctgccatgcttaaagcttcaaagaattatgatgaagatttacgcaaagttattgaaccaatggtaatgtttgataagaatggtaaggctaaacgtggaattgaaggattcagagttttagttggtaagatgccatttaagcaagctgttcttgatggtaataagaagtttatgctaactgggactgttgatacaccgaatttaaagcaattggtgttgtcacagcaaaatatgaaatatattcttgattatattgaagatgttgattgtcgaaaacataaatttggtgataaggttcaaaatccagataaatgtctacttgaagtattcgatgaaattattgaaatagttgataaatattttgaattgtttgatagcagagattttagagaaaaattgcggaacagtagaaataaatttataaaattagaagcttctaagaaggctgatacaatattagcaattcttaaaggccttcaggcaaaatcaacgagggcaacaattaaagaattaaatatatcagattttggaagaattataacttcgagtatttccccagaagcacaacttatctatcaatctccaacaggcttatttgaaagacgtgttaaagtcaaagacttataa

SEQ ID NO: 325 - DNA, 4128 bp, Lactobacillus johnsonii DPC 6026
atgaccaaaattaaagacgactacatcgtaggattagatattggtactgattcatgtggatgggtagccatgaattctaacaacgatatcctcaaactacaaggtaaaacagcgattggatcgcgtttatttgaaggtggaaagtcagcagctgagcggcgtctgtttagaacaacccatcgaagaataaaaagaagaagatggcgtttgaaattattagaggaattttttgatccttatatggcagaagtagatccatatttctttgctaggttgaaagaatcaggcctttctccattagataaaagaaaaaccgtatcttcaattgtttttccaacttctgctgaagataagaaattttacgatgattatcctactatttatcatcttcggtataaattaatgacagaagatgaaaaatttgatttaagagaagtctatctagcaattcatcacattattaaatatcgtgggaatttcttatataatacatcggtaaaagattttaaagcatcaaaaattgatgtaaaaagtagcattgaaaaattgaatgagttatatgaaaatttgggtttagatttaaatgttgagtttaatatctctaatacagcagaaattgaaaaggttcttaaagataaacaaattttcaaaagagataaggttaagaagatagcagaattatttgctatcaaaactgataataaagaacaaagtaaacgtataaaagatatttctaaacaagtagccaatgccgttttaggttataaaacaaggtttgacactatagcactaaaagaaattagtaaagatgaattatcagactggaattttaagcttagcgatatcgatgcagatagtaaatttgaagcattaatgggtaatcttgatgaaaatgaacaagctattttgttaactattaaagaattgtttaatgaggttactctgaatggaattgttgaagacggaaatactttgtctgaatcaatgattaataaatataacgatcatcgtgatgatttaaaattgctaaaggaagttattgagaatcatattgatcgaaagaaagccaaggaattagcattagcttatgatttatatgtcaataatcggcatggacaattattacaagcaaagaaaaaactgggaaagatcaagcctagatcaaaagaagatttttataaagtagttaataaaaatttggatgattctcgagcatctaaagaaataaaaaagaaaatagaactagattcctttatgccaaaacaaaggactaatgctaacggtgtaattccttatcaattacagcaattagaactggataaaattattgaaaatcagagtaagtattatccattcttaaaagagattaatcctgtttcgtcacatttgaaagaagcaccgtataagctagatgagttaatcaggtttagagttccatattatgttggaccattgatttcgccaaatgagtctaccaaagatattcaaacaaagaaaaatcaaaattttgcatggatgattcgaaaagaagagggtcgaataacaccatggaattttgatcaaaaagttgatcgtattgaatccgctaataagtttattaagcggatgacaactaaagatacttacttatttggcgaagatgtcttgcctgctaatagtctcctttaccaaaaatttacggtgttaaatgagcttaataatatcagaattaatggtaagcgaatatcagttgatttgaaacaagaaatatatgagaacttgtttaagaaacataccactgtaacggtaaagaaattagaaaactatctaaaagaaaatcataatttggttaaggttgaaattaaaggattagccgatgagaagaagttcaattctgggttaactacatataatagatttaaaaatttgaatatttttgacaatcaaattgatgacttaaaatatcgaaatgattttgaaaagattatcgaatggtcaacaatttttgaagataaatccatctataaagaaaagctgagatctattgactggctgaatgagaagcagattaatgctctaagtaatattaggttacagggatggggtagactatctaaaaaattattagctcaattgcatgatcataatggtcaaactattattgagcaactttgggatagtcaaaataattttatgcagatagtaactcaagctgactttaaagatgcaattgcaaaagctaatcaaaatttattagttgctactagtgtagaagatattttaaataatgcttatacttcacctgcaaacaaaaaagcaattcgtcaagtaattaaagtggttgatgacattgtcaaagcagcttctggaaaagttcctaaacagattgcaatagaatttactagagatgccgatgagaatcctaagagaagtcaaactagaggaagtaagctgcaaaaagtttataaagatttgtcaactgaattagcatctaagacaattgcagaagagctaaatgaagctattaaagataaaaaacttgtgcaagataaatattatctatattttatgcaacttggtagggatgcctatactggagaaccaattaatattgacgagattcaaaaatatgatattgaccatattttgccacaaagtttcattaaagatgatgctttagataatagagttttggtttctagagcagtaaataatggtaaatcggataatgtaccagtaaaattgttcggtaatgaaatggctgctaatttaggcatgactattagaaaaatgtgggaagaatggaagaatattggtttaattagtaagaccaaatataacaacttattgacagatccagatcatattaataaatataagtctgcaggttttattcgacgtcaattagttgaaacaagtcaaattattaaactagtttcaactattttacagtctcgctatcctaatactgagataataaccgtgaaagccaaatataatcactatttacgagaaaagttcgatctatacaagagtagagaggtaaacgactatcatcatgcaatagatgcgtatctttcagcgatttgtggcaatcttttatatcaaaactatcctaatttacgtccattctttgtttatggtcaatataagaaatttagctctgaccctgataaagaaaaggcaatttttaataagactagaaaattctcttttatctcacaacttttgaaaaataaatcagaaaatagtaaagaaatagctaaaaaattgaagagagcatatcaatttaaatatatgcttgtctctcgagaaacagaaactagagatcaagaaatgtttaagatgactgtctatccacgattcagtcatgacactgttaaagcccctcgtaatttgattcctaagaagatggggatgtcgcctgatatatatggtggatatacaaataattctgatgcttatatggtaattgtgagaatagacaagaaaaaaggaacagaatataagattttaggaatacctaccagagaattagttaatttaaaaaaggcagagaaggaagatcactacaagtcttatttaaaagaaatacttacaccaagaattttgtataacaagaatggaaaaagagataaaaagattacctcatttgaaatagttaagtcaaaaatcccatataagcaagtaattcaagatggagataagaaattcatgcttggtagctcgacatatgtatataatgctaaacaactaacattatcaactgagtcaatgaaagctattacgaataattttgataaagatagtgatgaaaatgacgcattgatcaaggcttatgatgaaatactggataaagttgataaatatttgcctttatttgatatcaataaatttagagaaaaactgcattcaggaagggaaaaattcattaaattatctctagaggataaaaaagataccatcttaaaagttttggagggattgcatgataatgcagtaatgacaaaaatcccaactattgggttgtcaacaccattaggatttatgcagtttcctaatggcgtaatactctcagaaaatgcaaagttaatttatcaatcaccaacaggtttatttaaaaagagcgttaagatttcagatttgtaa

SEQ ID NO: 326 - DNA, 4026 bp, Lactobacillus lindneri DSM 20690
atgacacagaaagtaataccgtataacatagggttagatattggaactaattcagtaggttgggcagttactgacaatgaaaataaattattacatattaaaggacacaatggaattggtgttcgattatttaaagaaggacaatcagcggctgaaagatgtggttttagaactacaagaagacgattatcccggagaaagtggcggttgcgtttattaaacgaaatttttgctgataaaattgcaaaagttgatcctagcttttttgcaagattgaaacaatcaaatgtttcaccaaaagatccgaacaaaactatgtttggaaatattttatttgataatggaaatttaaatgataagtcttttcatgatgagtataagactatttatcacttgcgacagtcaattattgatcatccagaaaagaagtttgatattagattaatttatttagcaatgcatcatattattaaatatcgtggtcattttttgaatcaagcaaatgttcaagattttaaaggtggaaaaattgatttagaagaatcttttaaagatttaaatagtatttttgaaaatcaaggtcgtgacttacgattggttactgaagatgctaataaatatgtaaaagaacttagcgacaattcaaaaactagaaatgaccggcagaaagaattatcaaaagttttgtacattccaattgataaaaattctgataaaaacaataaaaaggttaccactgaaataataaaagctattttaggtatgaaagcaaaatttgatgttatttttgggattgatgctgaaaatgccaaagaatggagcttaacttttaatagtgatgattttgacgataaaattgaaggattatcagctcaaatgaccgatgaagctggggaaatccttttgattttaaaagaactttattttgctttaaacttatctgatattttaaataactcggttactgataaaaatgctaaaactttatctgaagcgatgattaatcgttatgatgatcataaggaacaattaaccatgttgaaacaggttattgataactctgacaaaaagcatgctaaagcattaaaagctgcctattcagcttatattgatggtgaaaataataaaaaaatttcttttgaagatttaagaaaacgaattcaaaagaatttagataattcagaaacctcaaagaaaataaatgatttattggaacatgattattttttaccaaagcaacgttctaaagaaaacggtgcaattccacatcaattacaacaacaagagttggataaaattattgaaagtcaaaagcattattatccctttctggctgaattaaatcctaatgaaaaacgtagtcgacaagctaaatataaacttgatgaattagttgctttccgagttccttattatgtgggtccgatggtgaaagccactgaaaataatcagagtaataacggtaagtttgcctggatgattaagaatgataatatttcagataaacttaaaaaagaagaaattactccttggaactttgataaaaaggttgaccgaactgaaacggcgactaagttcattactagaatgactacaactgatacatatttaattggtgagccagttttacccaagaatagtttgttataccaaaagtttgtagttttaaatgaattgaataatttaaaaattaataaacaaccaattacacccgaacaaaagcaatatgtttatgagcatgttatgaaacaaactaaacgtgtctcattgaaaaaaattgcggatgctctagtgattaaaggtgattatccttatgcaccagaaataacgggaacaacagaccaaaaaaatatgaataatggtctatcaacatacattgatttagctaaaatatttggcgatgagttagatgatattgatagaaaagaagattttgaaaaaataattgaatggtcgactatttttgaagatcagcatatctttgctttaaaacttaaagagattaaatggcttaccgaagaccaacgtaaacaagtagttaaacttcgttaccaaggttggggtaaactatctaaaaaattacttgccgatttagttgatgataatggtcagcgtattattgaccttttgtgggattcaaagcaagactttatgcaaattgtaaatcaaaattcatttaagcaagccatagcagaacacaatggcgctcatttagaagaaaaagatttaaaagatattattaataatttgtatacatctccacaaaataaaaaagctatccgacaagtcattttagttgttgatgacatcattagggctgttgggtatgaaccagttaatattatgatggaattcgctcgtgaagattctaaagaccatcgcttaaccaattctcgaagtcgtcaattagaaaaggtttataaagatattactaatagttggtttgatgacgataatgttaaagatgaattaaaagataagattaaagataaagctaaatttactgatcgtttatatctctattttacccaagggggaaaagatttatatactggtgaacctttagatattgataatctatctaattatcaaattgatcatattttgccacaatcatttattttagataattctttagacaatcgggttcttacttctaagataaataatcaaattaaaaaggataacttgccgggtgaattttttggttctaaaatgcataatttttggaaacatttgaaagaattacatttaattagtaataaaaaatactataatttaacgcttactcctaactcaattagtaaatttaataatcaaggacgttttattaatcgtcagttagtcgaaacaagacaagtgattaaattagctgctgaaatactccataaccgttattctgaagaaaatggaactaacattgtgacagttaaagctaacttaactcaccatatgcgagaaaaatttaatttttataagaaccgaaatgttaatgattatcatcatgcgtttgatgcatatttagctgcctttgtagggaattggctcttacaacaatatcctaagttaaaaccatattttgtgtatggtgattttgctaaaactgaaattgataatttgaaatcatttaatctgatttataagtttgaacaagctcatcaattaaatgaagaagatggaaaaattgctaaagatacggatgctttattaggttatatgaaaaatgtctatcactttaagaaaatgttggttactaaagaattggaaaccaatcatggcaatttgtttaaacaaactttatatccctcccatggtaagatgaaaaatttaattaatccaaaagaaaataggtcaagtgatatttatggtggatattcttcagaaacaggagcttatgtttctttaattaaagtatttaaaaagaataaaattgaaaacaagattatcaaaattcccttactgtatattgataaattgaataggcaggcaaacgctaagcaatttataagaaattttataattaaagatgattcaaataaatttgatatcttatcagaaaaaatatttcttaatcaattagtaattgatggtgatgagttgtttacaatttctgggagtggagatagacaaaatgctcagcaattaattttatctgataaatcactgaaaattttatctaaaaacattaatgtaattagtaagaatgatttaattattatttttaatgaaattattgatgatatttgtaaatatatgaaaatgtatgaagttgagaattcagatgaaacaaaagctaagtttgaagaaattaatgataaagatcgtatgttaaaaataataaatgatttattactaggtttacatgcaaatgcttctaggtctaatctatcttctattggtctatctccaagttttggtagattttttagcggtaatgctggaattaaattaagtgaaaatgcaaaatttatttatcaatcaccaacaggtttattttcaagaaaagttaaaatttctgatttgtaa

SEQ ID NO: 327 - DNA, 3525 bp, Lactobacillus mali ATCC 27304
atgggaaagtatagtatagggttggatattgggatttcttctgttgggtggtcgattattgatattgagaagaaaaaaattgttgatttaggcagtcgtatttttccatcaggaaatgcagcggctaatcaagatcgtcgcggatataggggaacaaggcgtctgattaggagaaggaaaaatagattagcggacgtaataaattttttaggagaagaaaattttatagacacaaaagtagtagatcaaaatgggaatatacactacaaacttttagtaaatagtactgaaagcccttataaattgcgtgttaagggtttgtccaaaatgttaacaaagcaggaacttgttattgcactttaccatatcgtaaaacatcgaggtatttcttatgatttaggtgatttggaagatgatggaacaagtggtgtaactgattacaagacttcaattaatattaatcgtcaattgttaattaaaaagacagttggtcaaatacaattggaaaggttaaaggagtttggtaaagttcgtggacatgtaaaaaaagatgaaaatataactttgctcaatgtttttccttcatcggcatatgttaaggaagctacacaaattttgacaaagcaaagggaattttatccagaaattactgatgattttattacaaagttcataccattcattagtcgtaaacgagactattttgttggacctggaaatgagaaatcgcgcacagactatggaatttataaaaaagatggtcgaacattagataatctttttgatgaactcataggaatagataaaattagcggagaaaaaagagcatcagcatcaagtgtaactgcacagatatataatatgcttaatgatttgaacaatttaacagtaaccaatactgaagatggaaagctaacaactcaaacaaaaagggaaatcattgaagcagataaaactacaaatggtttgtttggaataacgcaaatttgtaaaataataggttgtaaaaaagatgatatcaaagggttccgaattgataaggttgaaaagccaattatgcatacactctctggttatcgaagatttcgtaaagaacttgctaagattaatatagaagcaaatgatctggacattaatttagttaacaaaatcgctgatattctgacacttaatactgagaaagctgaaattcgtaaacaattgaataaaagtaatatagatgtctccaatgagataaaggaacttattatcaataaaaataaggattttttggtagatggtcgagcaacatggcatagcttttcttataaaacacttaatttacttataccggaattgatgaatacttctgaagaacaaatcactattttgacacgtttgggtctggtgaagtctaatagtgaaaaatataaagggctcaaaaacattcctgcacgaagaattacagaaggtatatataatcccgttgttgctaaagccacacgtgaggctgttaatgtttttaatgcaattgctaagaaaatagggcgtgataatattagcgacgttgttattgaattaccacgtgaagataatgaggcagatataaaaaaaggtattgttaaaagacagaagcaaaatgagttagaaaaagaagctgctgatgcattagttaaacaacagatgacgatatcagacagtgcattagttgcacattatcgtaaggtcaggggcctatctcagaaggtgcggtactggtatcaacaaggtacttgttgcccttattgtgggaaaaatattgaggcggttcaactaatcaataataatgatagttttgaggttgaccatattataccaatttctgtaagttttgatgattctcaaaataataaagtattggtacacagccaatgtaatcaggcaaaaggaaagcaaacaccacttggctggctaaataatggcgggggttttggacaaaataaaactgaatatgttgctaaggtgaaaacaaataagaattattcaaaaaataagatggataatttattgaatgatatggatcttagtgacattgttacacagcgtggttttatccagcgaaatcttaacgatacgcgatatgcctcacgtattgtacttgatgagttttattctttttttaaatcaaataatttatcaacaaaggttaaaatagttcgtgggaaatggacatcacagatgcgtaagaagtggaacggagtaggtgggctgaagaaaactcgtgatacatatcatcatcacgcgattgatgctagtattatcgccagtttcccattattgaaagtatttgataaggctataaaattaattgacattgatagagaaacaggagaaattctgcaagataaagaagcaattaaaatgtcacaggaagctaagttactagagaaaataccggtcattcaaaatgagaaatttgaagagctcattaatgaactttatgattttccactctttaaacaggtagaattagcaaatgatattactaatccagaaaaccctgtaaaattcagtcatcatgttgacaaaaaagctaatcgttcagttgcaaatcagacaatttatggtacaagaattaaagaaaaggaaataaataaacgcggaaaagtagaaaaagtgcaagaaagatatattttaggcacaattaagaatatatatgatattgatagctttacaagttttaaaaaaatatacgataaaatgagtaaaacaggtgatgtcaagtttttaatgcagaaaaaagatccgaaaacatggggaaaattagttgaaatacttaattcttatcctgattcggaagaaattacacaagtagacggaaaagtcaaaagagttaaggtttcacctttcgagctttatcgccgagaaaatgattttatcacaaaatatgccaagcataatgatgggcctaaaatagtgagtataaagtactatgattcgaagattggaagccatattgatattacacctataaatgcaaaaaataaggttgttttacaaagcttaaaaccatggagaacagatgtctattttaattcagaaactcggcaatatgaattacttggtttaaaatattcagatctaaaattcacaaacggtgtttatgggattactagcgaagcatatgagaagttaaaacatggtataagcgaagatggtacaaaaacatggaaaccaattggtaaaaatagcggatttagattcagtttgtatcgaaacaatcgagtaaagattgttgatgaaaaaggtgaatcacttgaattattgtttgcctctaggacgacaagtaacgaaggatatgttgaactgaaaccaatttataagtctaaatttgatagtaaagaagatgttggtttttatggtcaaatgactccaagcggtcagtttgtcaagaaaatggccagagttggatataaactctacaaagtaaatacagatgttttaggaaatccatattacattacaaaagagtcagatgatccagagttaagtttatataaaaagtaa

SEQ ID NO: 328 - DNA, 4074 bp, Lactobacillus mindensis DSM 14500
atgaacgatcgaaataaaaaatacaatattggattggacatcggtacaggttccgtcggatgggccgttactgataataattacaatttattacacgcaaaaaagaagaacctttggggaatacggctcttcgatggtgcagagacagctgctagtcgtcgaacttttcgatctactagacgtcgttatcgcagaagacgtaatcggatcaattggttgaatgaaatctttgcagatgaattggctaaaaaagatcaatcatttttagttcggatgaattcctcatgggtctccaaaaaggataagataagacaacgtgatcaatataatttatttatggattccgattatacagatgtggaatatcatcgtgaatttccaactatttttcatctaagaaaacgattaattgaagataaatctcaagccgacatcagattggtttatttggccttacataatatcatcaaatatcgtggtaatttcacttacgagcatcaaaatttcgacgtttcacacatggattccggtctagctttactactaaatcaattgaatcagcaattacaagcatttgaagtcgcatttcctgacgaaaccaacttcgaatcaatgagtacgattcttttagaaaaaaagactcctacccaaaaaatcgatgagatagtcgaccagattcaacctgaaaaagacctacttcagataactaaaaatattatgaaaatgttgcttggtaataaagctgatttggtcaaaatattctcactcgacagtgacgataaaatcactgttgaattctcatccaactccatcgagcaagacctatcaaacttagaagaaaccttgtcagatgaacaatttaacataataacgctcgcaaactctatttatagttcaattgtccttaatgacattttgtccggtgaaacttatcttagtttcgctaaagctagacaatattctgatcataaaaaagatttagccaaattaaagactatgtggcgtgaatcaccagatagaaaagccgttggtaaagctaaaaaagcttacgatgactatctacattctggaaagtatggaatcgaagatttttacaaagatatgagtaaatttttagagactgccactcccgttgaacttgccaaagaggcaaatgaaaaaattctcaacaagagctatctattaaagcaacgcaacaatgaaaacggcgttataccattccaactcaataaaaacgaaatgattgagatcatcaataaccaagctaaatactacccatttttggccgagaataaggataaattactttctatcctcagttttagaatcccttactatgtcggacctctgcaatcgaaaaaagacaatccgttcgcctggatggagaagaaatctcaaggaaaaattcgtccttggaacttcgatgaaattgttgaccgtgaagcatcatcaaataactttattaggcgaatgactagtaccgatacttacttaattggtgaaccagttttacctctaaagagtcctatttaccaaaaatatgaagttcttaatgaattaagcaatgttcgtatcaatgccgatgaagtggataatccacttggtgacaagttatcagtcgacttaaaacaagccatctataacgaattattcctcaaacatcgtagtgtttcaaaagcacttctaactaagtggttgatcaatcaaagttatttccaaaatccccaaataagtggtctggcagattctaaaaaattcaattcaggattaactacttatcacgatttcaagaaaatttttggtgaagatttcgtcaatgatccaactaaccaatcacaactagaacaattagcagaatggctaactatttttgaagataaaaagattctaaaaataaaattggacgattctcaattcaattgcacacctgaacaaattaaaaaaattgctggaatgcgttatcaaggttggggacgtctttcaaagaaactactctgtgatattaagacaactactgtcacaagtaaaaaccatcaacaagctagttactcgattcttgatttaatgtggaataccaatcgcaactttatcagtgtcttaaaaaatgatacttataaattcgaagacaagattcaaacttttaatctcgataaaaacgaagccgctactcctcaagcaatgattgacgagttacagacatcccctgctctcaaacgtggtatccgccaatctgtaaccatcattcaagaactagttaaattcatgggacatgctccagaacatatcttcctagagttcactcgtgaagatgacgttagttctttaaccaaatccagagacagccgtctcaataaactttatgcacgcatcgccaagaatactaaaaaaacagacgatgagctgaagaagtccttgttgccttctagtgatattaaagctaccctcaaggctaacaagaataacctatccaacgaccgtttgatgttgtactacctacagatgggaaagagtttgtattccaatcaaccattggatattaacaggttatctgaatatcaaatcgatcatattttgccacaatcatatatcaaggataattctctagaaaatcgtgctttagtattagcttctgaaaatcaacacaagtctagtgatttattattaaagccagaaattattaatcaaaatattgctcgttggcgttacatgaaagatgctggcttaatgggtcctaagaaatttaagaatctcacacgaattcaaattactgacagtgatcaaaacaatttcatcaatcgtcagttagttcaaacatcacagatcatcaagcatgtctctaatattcttgattcaatgtatggcgaccaaggcactcaatgtgttgaaaccagagcacatctctctacagagttcagaaaagccttcagcaacgaagatgataactatcacttccaacacccagagttcgttaaaaatcgtaatatcaacgattatcaccatgctcaggatgcctacctagcctgcttacttggtttataccaaatgaagaaatatccaaccgataacatgattctgttgaagaaagaatataagagattcttcagcaatactaagaagatctatgacaagaaacatcattttcctgattacgttaaaaatggttggattatcggttcaatgttcaacggagagaagtatgttgacgaggaaactggtcaaattatttgggatcaacaaacaaaagatatggtcagctgtattttccaatacaaacaatataacgtcactaaacgtaccgaagctgctaatggtgaattttacaatcaaactgtctacaagaaggaccctaatgaaaaacgtaagctaatttcgcttaaacaaggtctggatactaaattatatggtggatattctggtgacaatcctgcctacattgttttagtaaaaatcgatgataagaaaaataaactagttaaaatgcctattcgtttggctgaacaagttgataataagacaattgatctacaaacttggctagaagaaaatgttccacacaaaaaaggcatccaagtcctcaaaactaagatacctttgggtcaagtcatttatagtaagaagaatggttatctagcactcaaatctgatactgaaattgttaatgctcaacaactagttctaccttatggttatgttgcgcttctgactttgttacagaaaatgcccgaaaacaaatatgatgaagtactagcttgttatgacgatggcattttggataatatcttcgttgctatcattgataaaatgaaacacttctatccttactactctggcgagcttaaaacattatcggataatatcgataacttcaaagaatctccggatgttaacaagattaagacattacaacaattgttgttactgttacacgcaagttcaacaactgcatctattgaatttaacaatgttaagaaaaattcattaggaagaaaaccaaatagtataaatattcaaaatactgatttactaagcttttccgccactggtttatatgaatcaagaattcacatagactaa

SEQ ID NO: 329 - DNA, 4149 bp, Lactobacillus mucosae DSM 13345
ttggatattggtacaaattcaatcggttggaccgcaattgatgatcatttttcattgttgcgcgttaaaggtaaaaatgcaatcggcgtccggacttttaaagagggggaaacggcagcagatcggcgcggctttcgaacggcccggcgccgcttaagtcgacgtcgctggcgccttcagtttttggatgaattttttgcgccatatttagcagaagtagatcctaattttttggcaagactcaagcaatctgatatctcggcaaaagatcctgctaaaaatcaagaatatatggggaaattgctgtttccggatcaggaagctgcatcagatggaaatggatatcctacgctgattcaaatgcgcaaagcaatgccagctgaaaaggcagcagattttccagtctttaacatttaccagctgcggtatgcactgatgaatgaaaagcgtaagtttgatctacgtgaaatatatcttgctgttcaccatatcgttaagtaccgcgggaattttttaaataatacaagcgttgacaagtttaaagccgatcaaattgatttcaataaatcgtttgagacgctaaatgacttattccgtcaagtacagccgatcgccccatttcaaattgacttgaccaaggtagacgaattgggaaagcttttattggataccaagcaaaagaagcttgatcgtcaaaaggctgttgccaaactattgccattgattgaagatgggactgataaggagatcgttaaagctcatcagcaaacggctcgtgaaatcagtaaattaatcctgggatacaaggcaaaggtcggtttgatcctgcaaaacaatcttgaccagacgctggatatgagtacggaaaacagtgatgatcagttgatgcagattgccgaagaactggatgactaccagatggagctgattaatcaactgtcattgctgtattctcagatcatgctcaatgaaatcgtacccaatggcgaaaccgtttcggcatcaatgctgaaccgttactacaagcatcgctgtcagttaaaagaattaaaagattatggtgctgcccaagataaaaaaactcgtgagcagctcgatcatctttatgctgaatatattggccagattcctaaagacagcaaatttgactttaccaaagatttgaaaaaattgatggacaagtctgacctgggacaaaagattaaagacgagattgaggctggcgactacctgccgaaacagcggacatctgcaaacggtgtaattccgcaccaaatgcatcaacaagagcttgatcaaataattgaaaatcaaaaagaatattatccttggctggcagaaccaaatccagttgaaaagaacattaagaatgccaaatataagctggatcagttagtcagcttccgtgttccatattatgtcggaccaatgatcactttggctgatcaacaaaagacgtctaaggcctcttttgcatgggcagtcagaaaaaaagctggcaagattacgccatggaatttttacgatatgattgatcgtgagaaatcggccaataattttatcaaacggatgacgaataaggacacttatttgttaagcgaggacgttttgccggcatcaagcttactgtaccaaaaatttacggttttaaatgagctgaataatattcgcgtgaatggtcgcaaactacagccagcactaaagcaagctatctatacggacctgtttcagaagcgtaagacggttaatcttaagactttgacgaatttcttggcgattcacgaaccaacgctgactaagccaaaaatcgaaggactgtcgaatggtcgcagctttaattcaagtcttggtacctatattgatatgtctaagatacttggagacagtcttgatgatttaaactatcgtgatgatattgaaaagattatcgaatggtcaaccgtatttgaggatagtgagatttacggcgtcaaactgcaggaaatccagtggctgaccaacgaacaaagagaaaaattggttcggaaacgttatcagggatgggggagactctccaagaaactgttaacggggatcactgatgaaaatggtcagcgcattattgatctaatgtgggataccagcaaaaactttatgcagatcgtgcatcaaccagtctttgaagaacaaattgctgaacttaatcagcagctgttgcaagacgctgacaaggcaccattggaagttgttgacgatattttggctgacgcgtatacatcgccccaaaataaaaaggcaattcgccaggttgtcaaagtcgttgctgatgttgtcaaggctgttggcaatgccccagcatcgatttcaattgagtttgctcgtaatgaggatcgcaacaaggaattgaaaaacagtcgacggcacagcattgaaaagctttatcatgaaacggccgaaaaactggtcaagcaaaccaatctgcttgaagaattgggaaacgtcaaggatttgaatgatcgctattatctttactttacccaggctggtcgtgatatgtatgatggcacgccaatcaatatcgatgaaatcagcacgcattacgagattgatcacattttgccacaatcattcttgaaggataattctttggataatcgggtcttggttaagaaatctgaaaacgcggctaagtcggatcgagtaccggcaaagctttatggagctaaaatgcgggccttttggaagcaacttaaagaaagccagctgatcagcaatcgcaagtatcttaatctgacgaccgatccagaacaggttgacaagtatcagatgcagggatttgttcatcggcagttggtagagacgcgccaaatcatcaagctggcagccaatatttttggttcgctttatccagacagcgccgtgattgaaacgcgggccgagcttaccaagcaattgcgtgaaaagttcagcctttataaagtacgtgacgtaaatgactatcaccacgctgttgatgcttacttgacggcgtttgctggccactatctgtatcaacgctatccaaagctgcggccgatgtttgtctacggtgactatgccaaaatttatgctgatgatttgaaacggttgcgctcggttaatctttttcatgacttggaaaaagatcaatacaatagtggaaccgcggtaaatccagaaactaaggaaaaaatcgtggatgtcgactggctgagcgattatgtatccaagattcagcatttcaaatatatgctgatttctaaagccgtttatactcagcacgggcaactttatggggcaacgattcttccagttgcgcaggttgataaaatctcagcaccaattggcattaaggacgataaaccggtcgatatctacggtgcttataccaatgaggttgctgcttatatggcaatcgttcgcgttaacggcaaaaagcctaagtataaggttgttagcgtaccggtcagaatgctgcagcgactgaagatggctgaacaaaaaggtcatgatcagtatatgcagaccctgcacgatgttttattgcgaaacttcacttcgcttaaaaagaaccgtaaaaccggattaaaagaagccgtggtaaaagactttgacgtgctggttccttgtgttcgctataatcagttagtcattgacggggataccaaatttacactggggagtgctacttatcagcataatgccaagcagctggtattatgcaatcattcattagaaacgttagctaataattttgaatacgtcagaaaacatcctgatgaagctgatgaacggatgataatgctttatgatgatattcttgaccaggtcaaccactactttacgctgtatgataaaaataaattccgtgaaaaattaaatgcaggccgagataaatatctgaagctgccaaccttttcacagtttgaaaacaacaagaagacggcaattggcaaatccgaggctataatcaacatattgagaggactgcatgccaatgcggctataacgaacttaaagtgtttgggcgtgtcaaccccatttgggcaattacagtcgccatctggtattgaattatcagaaaatgcaaaattagtatatcaatcaccaacgggcttatttagcagagaagttttgttgaaagatctgtag

SEQ ID NO: 330 - DNA, 4131 bp, Lactobacillus namurensis DSM 19117
atggataagaagtatggcattgggttagacatcggaacaagctcgattggttggaccgtagttgataaatacggccatatcatccgggttaagggccaaactgggattggtgtgcgtttattccgtgaaggacaaacggcggccgagcggcggacttttcggacaacccgtcggcggctaagtcggcgacggtggcggttgagattgttacgggaaatttttgatgaaccgatttctgctattgatgagaatttttttgctcggcagaaggcttctagcttagctcctggagatgctcgttatcagcaagcgtttcagctttttaacgaccgaacagaccaggcattttattgcaagtatccgacaatctatcatttgcgtcaggcgttaatgacggagtcacgacagtttgatatacgagagatttacctagctcttcatcagattattaaatatcggggccatttcctgttggggggagcggccaaggactttcaatcagataaactggacttagaggcctattttacgacgattaatgctcagttggcggggatttactcggatggctctgttcaattgcctaccttggattggaatcaggcttgccaagaactgacggacaccagtcgaacgcaaagtgaccgaaaaaattggctagttaaagagctgaaaagttacggagattctcagttaaagccaatttacacgcaaattgctaatgctattttaggattcaaaacggatcttgctaaaattatgggaattaatgatccggagaaagccttatcatttaatctggatgccttggatgaccatcgagacgatgtggcggaacttttaacggatgagcaaattccactggtgaacctgttggcgaaattacatacagcattggaactagccgctattttaccggatggtcaaactttgtcaggcaaaatggtggaaatctatgaaacgcaccgaaaacaattgaagacgtacaaggcgtttattcggcaactaccagatcgacagcagcggttagcgttaaagcaggcttatgaccattatattgatcaagggttgaatcgagaggccttttacagtgaagttaaggccattcttgagaaacagaaaccgttgacagcgacaggacaagcaatgaaaaaagctatggatcagaatgcctttctgttgaaacagcgaaccaagaccaatattgcgattccttatcaggttcagcaacaggaaatggaccagattattgcgaatcagtctaagtattacccttggctggcaacgcctaatccggttaaaagccggcgcgtgattgccccctataaacttgatgaactggtttgttttagagtgaattattatgtggggcctttggttcagtccaaacccggtgaagcgaccaaagaagctaagtttgcgtggatgacgcgtaaggaccctcaatcaacagtagcaattaccccctggaatttcgatcaacaggtggatcgtcaggcttccgctaatgcgtttattcaacggatgaaaacgacggatacttacctgctgggagaagatgtgattccaaaaaatagcttgttgtatcagaagtatgaagtacttaatgagttgaacaatgttcgggttaatggagattggttggatcctcaacgaaagcagtatctgttcaaaaagttattcatggatcaacctcagtcggttgtcaccgtcaaggcactacagaagactttggtggtaattggggcatgtcctactttgccaactgtggaaggattggctaatcctaagcgcttcttgagccagttaaccacgtatcatgacttttgcaaactgttaccggatgacatccagcgtgcagatcgacaagctgatattgaaaagattatcaactggtcgacaattttcgaagatacagctatctttaaggaaaagttacgggacattaaatggttgtcagctgaccaaattcgtcggttaagtagtcgaccacggtatcgcggttgggggcggttctcagctaaattgttatgtggcttgcatgatcgccaggggaatacggtaatggacgaactgtggcagacgagtcgtaattttatgcaaattattcgccaatccgattttcagacggcaattgctgcggtgaaccagcaagatttgggacggcaagacctgcaacgggtgattgacgacctctacacgtcgccacaaaataaaaaggccattcgccaggtgctggcagtggtgacggatattcaaaaagccatgcacgggaaggcgcctagctggttatttgtagaagtggctaaaggtgcacaaaagaacccacaacgaacgcaatcgcggcaatctaagttggcggaggcttatcgagaaagtgcgcgtgaactcgttgatgaggccgtgaaagaacaattgttaactctgccagatgatcggcagacgttttctgatcgactagttttatatttccagcaaaacggtcgtgatatttacacgggtgagcctttggactttgaacgcctgagtaactatcacattgaccatattattccccaggcggtcgtcaaggacgactcactggataaccgagtactaacgtcgaatcaagctaatttggaaaaaggagcgcatgtgccgaccatatttcgggataagcaagaaccggtctggcaggagctgtaccgggtggggttaatatcacaccgcaagttgcgcaacctcttaactactcccgatgacttggacgaccgggggcgggcaaccgggtttattgcccggcaactcgttgagacccggcaggttatcaagttagttatggaagttctgagtcagtactacgatacaaccgaaaccgagctaatttcaattaaggcggggttatcgcaccaatttcgccaggaactgaatctccctaagttacgggcactaaacgattaccaccatgctcaggatgcctacttagcagcgagaattgggacgtatttgctacaacgctacccgaacttgaaacgctttttcgtctatggggactttaaaaagacgcactttgacttgcaacgacgctttaactttattggtggcatgatttccagggaaaagcagccctataatcttattaaaaatcccgtcacccaccaggttatttgggatgaagaaatggagattggtgattgccagaagaagaatccagagcaaccgaaacatgacgctactgtgaagatgatgaacttaactaaaattatgaatttgaaacatattttggtgacccacgaagtgtacgagaatcatggtgcattgtttaatcaaaccatttatcccgccagccaagcacataaaaagaagcttattccgcagaagaccgagaaacccattgaactttatggcggtcatagtagtgaacaagcaggatacatggcgattattcggctacttgggaaacgcccaggttataaagttatgcgggttcctgttcgttatgtcagtcaattacagcatcaggatgtagcagagcagaaaaagttactctataaaattttcgtttcggaattaactagtcgaaacaaggttaagccgtttgaggtcgttgtaccacacgtttgtttaaatcaaccagttgaggatatgatcaaggggcagtggcaccgctttgctttaagaaccaatgggtattatcagaatcaacagcagttaattctgtccttggttgctcagcggactttggcgggatataaaccaaaggatgatgagttgatggcggtttatcatgaaatctgtaaacaggtcaaatactacttcccactctataaaatgaataaatttcagtcacggctatttgcggccgaggagctcttgcaaaagcgttctacagtgaatagctttagtataacaatagggaaaaatgggaaagagaataaaacactaaacttaggtaaacgtgagctcctgttgaggctgttaggtgggttgcacgccaatgcaacccgagtcgacttgaaagatattggttgtacaggtcaatttgggcaacttcaagtgaagaatggaattaagttaactgaacaggcagtccttatccatgagtcaccaacgggactatttcatcgacgggttcgtttgaacgacctttag

SEQ ID NO: 331 - DNA, 1167 bp, Lactobacillus nantensis DSM 16982
ttttacttcaaaattcgattatcagaggttgtaattatggcagatagaatcagtttaggtttagatattggtgttgcgtcggttggttttagtgtattgaatattgatcaaggcaaggttgttgaactaggtgctagattgtttaatgccaaggtggctgaaggtaatcaggatcgtcgttctatgcgtggttctagaaggttattgaaccgaaagaaacaacgccgtcaagatacggctaaattgtttgaagaatttggtttgattagtaattatgataaagataacttttcagaattttttgataacaatgagaatccctatgaattacgggttaaagggttgaccgagaagctaactaaaaatgaattggctgaaagtttatatcaaattgttaaacgtcgtgggattagttatgacttgaaagatgctgattttgaggatggcgggactgactactctagtagtttaagtttgaataataaagctttggaagataaaacaccagccgaaattcaattacaacggttaaatgagtttggagctgtgcgtggaaaagttgttgttggggatgatttagataatcagaaagtattgttgaatgttttcccaactaaggaatataaaaaagaagctcaaagaattattgctacgcaaagggaattttatccagatattttaacggatgaatttgaaaagcaatattgttcgattctaacgcgtaaacgtgattactttgttggaccgggtaatgaaaagtctcggactgattatggtatttataagacagaaggtcggacactggataatttgtttgaagagttaattggtcatgataaggtttatccagatgaattacgagcttctgcagcttcttacacagcacaattattcaatgtcttgaatgacttaaacaacttgagaattttgagttacgaagatgagaagttaactcaggccgacaaagaaacgattattaacgaattaaagagtaatgtgacaacggttaacatgatgaatttaattaaaaaggtcagcggttgtgaaaaagatgatatcaaaggatatcgaaccaacgataaagataagccagagattagttcaatggcaatttatcgaaagactcataaggaattcttgaaggctgacgttgatattactcagtga

SEQ ID NO: 332 - DNA, 3399 bp, Lactobacillus nodensis DSM 19682A
agaaatttggaaaacaaaattagcttaggattagatattggagttgcttctgttggttttagtgtaattgatgcacaagaaggtaaagtactggagttaggggccagactattcaatagttcagtttccgcggagaatcaaactcgtcgagatatgcgagggtccagaagactaagtaatcgcaagaaacaacgtcgtaaagatgtagctcaactatttaagacttttggattaataaattattttgataaagaaaattattttgataactttcaaaataatttaaattcttatgaattgagagttaaaggattatcagagaaattatcaaaagaagaactggtgaatagtttgtatcatattgtcaaaaggcgtggtatcagttatgacttggcagatgctgacactgatttcgatggttctgattactcatctagtttgaatcagaatcaattggaattacagacgaagactccagctgaaatacaacttactcgcttgaatgtacatggagctgtacgtggaaaagttacgatcaatggcgaggatgaggacactatgcaagtattgttgaatgtgttccccaccaaatcatttgtatctgaagcaaaaaagattattcaaacacaacaacaatattatcctgatattttgacggatatatttgaaactaagtatttagaaattctagaacgtaaaagagaatattttgtcggacctggtagcgaaaaatctagaactgattttggtatctataagaaagatggtagaactttggataatttgttcgaagagttaattggtcatgacaaaatatatcctgatgagttacgtgcgtctggtgcatcttatactgcacaggtttttaatgtcttaaatgatttaaataatttacgtatttctagttatgaaaacgggaaaatttctacggaagataaaataaagattgttgaagatttaagaaacaatatcggcaatgtaattataatgaaaatcattaaaaaggttgccggttgtgaagatgatgatattaaaggctatagattggatagcaaggacaaaccggatattcattcaatggccgtttatcgaaaagttcatcgtgatttattgaaatatgatgtggatattattaagtggccaacggaatttattgatgaattaagtccaatattaactttgaatacggagaacggtgaaattcggaaacaaatggtcaataagttgcaaccaaagtattcatttttaacggatgaacttattcaagttattattaataacaaatctagttttgacgttacttccaataataaatggcatcgtttctcattgaaaacaatgaatgttttgatcgaagaaatgttcagacgaccagttgaacaaatgactcttattcaagaactgggattgattaaagactcaggtaagagatttgaaaattgtaaacttttgccatatagggaaatctcaaaggatatttttaatccggtagcgtccaagtcagttcgtgaggctcttaaaattgttaatgccgtaatgaagaagtatggtcaaattgattatctggttatcgagatgcctcgtgataagaatgaagaagaaatgaagaaacaaattgaaaaattccaaaaggaaaataataagcaaaaagatgaagcaataaatgagtttgttaaaaaaattgggaataagaatgctgttgatgatggactaagacgatatggtggtaaattatatttcaagattagattgtggtatcaacaagatggaattgatttatataatggcaaagtaattgaaccgtttgacttattgaataatattaataaatttgaagtggatcatattattccagaatcaatttcatttgacgacagtattaataacaagacactttgctatgctgatatgaatcaaatcaaaggacaaaagacaccgtttgaatttatgaacgagggacatggccagggctttgcaaaaatgaaggctatggtaaataagaattcaaagttaaaaggtaaacgaaaaaattatttatttgatgaaaatattagtgatattgaaaccagaaaaaggtttatatctcgtaaccttgttgatactcagtattcgtcaagagtggttttgaatagtttgcaagagttctttaaggaaaaagaaaccggaactaaggtgactgtcgtccgaggtaagtttacttctaatttacgcaagcattggcatatcaataagacacgtgatacatttcatcatcacgccatcgatgcatcaataattgccgcgacaccatttttaagaatttggaaaaaagatgccagtttattccccatgcatgtctctgaaaatactgttgatattgaaactggtgagattcttaatgatactgaatttaaaaaagacttttacggattaccgtatagcagttttattgaagaactgaacggtgctgatgaccggattaagttttcgcatcaggttgataggaagatgaatcgtaaggtaagtgatgcgacaatttattcgacacgtaaaggaatgttgaataaagataaagaagaaactgattatgtcttgggaaaaatcaaaaatatttatgatgttagtgagtataacaaattcaaacgaatttacgataaagatccaaataaatttctgttggctcatcatgatccaaaaagctttgatgaacttagaaaaatcatgcaggaatatcctagtaaaattgataaagtaatgactaatggtaaagtaaaatctgtggatatttctccatttgaattgtatcgtcgcaaacatggaatggtacagaaatactctaataaaaataaaggccctgttattaaacaacttaagtatttagacaagaagttgggatctcacattgatattactccgaaggatacattgaatgataggcatgttgtattacagtcactgaagccgtggagaactgatgtgtattacaatagtgtgaccggtgaatatgaaattatgggtattaagtattctgatttgaagttcaatggtggtgagtatggaatcaagatgagcaaatatttggaaataaaagagcgtgaacaggtttcagatgagtctgagtttctgtttactctttataagagagatagaatccaaattataaattgtgaaaatgacgaaattgtagaaatgcttttctggtctagaaataattctaatattgggtatgccgaacttaaaccggtgtataaatataaaactgaggatgaaagttggccggtatacggatatggaaaaaatcaaatcctaaaaagattggtaccaaagaattgtaaaatattgaaagtaaataccgatatactgggcaatccatactatattaaaaaagaatccaaaaacccaaaaaatattcttgattaa

SEQ ID NO: 333 - DNA, 2700 bp, Lactobacillus nodensis DSM 19682B
atgaatagaaaaacgaccaaatttaacattgggttagacattggtaccggctccgttggctgggcagttacagatgataattacaatttattgcatgcaaaaaagaaaaacctttggggagtacgtttatttaatacagctgaaacagcggctgatagacgacttaatcgttctgctagaagacgttatcgcaggcgtcgcaatcgtttgaattggctagatgaaatatttgcggacgaattattccaagctgatcctggatttttgaaccgaatgaaacactcctgggtgtcaaagaaagacacagcaagaactcgcgatgaatacaacttattcatcgataaagaattcaatgacaaaacctactttgacaaatatccaactatctttcatttaagaaaacatctaattgaggatacacaaaaagctgatattagattagtttatttagccatccataatatcctaaaatatcgcggtaacttcacttatgaacatcaaaatttcgatgtttcgaagatgaatgaaggactcgaaaatactctctcaaacttgaataactcattagacctgttcggattaaaattacctgacgatgccgacttcaaaaaaatcagtgaaatactactagaaaaagattggagtcccagcagcaaagtcagcagcatcatcaccttactaaagcctgaaaaggatatgaaacaactatacaagcaaatatttactttattagttggtaacaaagctgacctaacaaaattatttaatatcgattctgctgaaaaaatcactattagtttttcttcaaatacgattgaagctgacctaagtgatgctcaggaaaaactaactgatgaacaatacgccatcgttgaaatggctaatccaatctatagtacgatcgttctcaatgaaatcctcaatggtgaaacttacttaagctttgctcaagtaaccaaatacgaaaatcatcacgaagatctgatgaaattaaaagacttatggagaaacgattctgaccgtaaagcagttaaaaaagctcgccttgcctacgataagtatcttgatgatggtaaatacaatcttgacgatttttataaagatctcaaaaaatatctatctacaaaagaagacccatattctcaaagtgcattagaaaaaatggagaatcaccaatatctcctcaaacaaagaactagtgataatggagttattccattccaacttaacgaaaatgaattagtcaaaataatcgataatcaatcacaatattatccattcctaaaagaaaataaggacaaaatcctatcactgattaacttcagaattccatactacgttggaccacttcaaagtgaagataaaagtgacttcgcctggatggaaagaaaagctaatggcccaattcgtccctggaactttgatgaaaaggttgaccgtgaaaaatcatcaaacaacttcatccgtcgcatgactgctactgatacttacttgattggtgagccagtacttcccaagtacagcttaatttatcaaagatacgaagtgctcagtgaattgaacaatgtccgcatcaagagtactggtgaagaatcagataagggttcacgtctaaacgttgatgttaaacaacgtatctacaacgaactattcaagaagcatactactatttcaacaaaacgtctgacagattggttgagaaaagagagttattattcagcacctgagattcacggactagctgataaaaccaagttcctatctagtctttcatcatatcgtaagctagcaaaaatatttggtaacgacttcgttgacgattcaaagaacctcaagcaactagaagaagttatcgaatggcaaacagtcttcgaagatcgacagattcttaaattaaaattgaaaaactcaaaactttataccgatgatcaaatcaaacaactagcagcaattcgttatcaaggttgggggcgcttctcaaataaactactcacacaattattggttgaaacaaaagtcaatggtgaacacatgccaagtaaccactcaattctcgacttgatgtggcagaccaagagtaacttcatggaaataattagagaagataagtataacttcgaaaaacaaatcaaagactataacgttggtgatgcagccgacaagaagccactagatcttgtcaacgagctaccaggttcaccagctctaaaacgtggtatctggcaagctatcgttatcgttcaggaactatctaagttcatgaaacacgctcctgaacacatctttattgagttcactcgtgaagatcaagatagtggtattaccaaatcaagatacaatcaattagataaaaaatataaaaatattggtgatatggttcgtaacctagcacccaagttgaagaatactctatatcttaaagctcaactgaaagacaaaaaagacgctctatcaaatgagcgactatgttgtacttcctacaaatgggtaaaagcttatacagtgaagccgagattgatatcaaccgtctattcacgacagattatcaagttgatcacatcttgccacagtcatatatcaaggacgattcacttgaaaataaggctttggtcaaagcaagtgaaaaccaaagaaaactcgatgacttactcctaccaaacgatgtcattgccaacaacattcaacgttggcaacaactaa

SEQ ID NO: 334 - DNA, 4074 bp, Lactobacillus oligofermentans DSM 15707
atggctgcgaaaaactataatataggtttggatattgggacgagttcaattggctgggcgatagtggatgataattatcaattaatgcacgcaaagggtaagtatggatatggaacgcggatttatagtgaagggcaaacggcggctgaccggcgtggctttcggacaacccgacggcgcttgaatcgacggaagtggcgtttgcgattactccaggatttctttgaaccatatattttaccgcaagacgaggctttttttattcggcaaaagcaatctaatttagtccctcaagatactaaaaaacagtatccggagagtgtcttatttgatgatacttcagataaagatttttacacagaatatccgacgatttatcatttacgacaggcactaatgacggaaaaccggcaatttgatattcgtgaagtttatctagcaattcaccatatcgttaagtatcgcggtcactttttaaacaatgctcccgtaaaaacttttaaaagtggcaatttagatttagcaattaaatttaatgaactaaatgaagaatttaaaagtgtttatcctgacttagaattacagtttaatcttgatcagattgatgaaatcaaaaaaatactactagatagcactaaatcacgatttgatcgacaaggtgaagcagtgaagttaatttatacggtctcagaagttaaaactattgaaaaattgcaaaataagattgtaaagcaatttttgagtggtattttaggcttgaatactagatttgatgttctgacaaatactgagagtgatgattcaatgtggaaattttcactggattcagaaagctctgatgatgcattagatgagatcattgctcaactcgatgatccggctattcatgtggtggaattggtaaatgagattcattcttcaatcactttggctgggattgttcctgaaggccaaggcttatctgaatcaatggttgaaaaatacgaagcacataaagcacacttacaattgttgaaagccgttgaaaagttagttgataaaaaggctgcggataaattggaagtagcctatgaccaatatatcaatggtaaagacagcaagcagttcattaaagaagatttttataaagcagtccaaagtgaaattaaaggggtggccggggatgaagttgccgagattaatcagttaattgagctggaccaattcatgcctaaacaacggacgaaggaaaatggtgccattccgcatcaattacatcaacatgaattagatgtaattatcgaaaatcaatcgaaatattatgattggttaggcgaaaaagttggaaatgaatataagcttgataagttagtttcattccgggttccatactacgttggaccattggttgatactgcaagtaaagagaaaaaagatgagactagatttgcttggatggttcgtaaaaatccagaatcgactgaagcaatcaccccatggaattttgaagatatcgtggataagaatgcatcggctgaaaactttattaagcgcatgacgaccaaggataaatatctacttaatgaagatgttttgcctaagtgtagtttattaacacaggattttgaagtttataacgaactaaacaatattagagttaatggagaaaaatttactgccgaacaaaagcaattaattcatgatgaactatttacgaagcatgcaagtgtgtctattaaacaattgaaagattttctggttagtgagttaatgtatgtccgtgataatttaaaagtcgaaggtttggctgatgaaaagaaattaatgagtagtttatcaactcaatttgactatcaaaaaattattccagatcaaattaatgacgtgaagtatcgcgaagatatcgaacaaatcattgaatggtcaaccatttttgaagatgcggctatttttaaaactaaattaaaagaaattgattggctaactgatgaacaaaggaacaaattagctaacaaacggtatcgtggttggggtagtttatcgaaacggttattggcatgcttggttgatgaaaatggtcaacggattatcgatattttacgtgatagtagcgataattttatgatgattgttaatcgtcctgagtttaaacaagcaatttttgatgaaaatgctaatttaactgagaccaatagtaaaaaagatatgtttgaaatgattgataatttttatacgtcacctcaaaataaaaaagcaattcgccaagtattattagtagttcaagatattcaaaatgcaatgggtggcgtggcaccacaaaagatatttattgaatttgctcgtgaagatgaagtgaatggtcgtcggactaattctcgctatagccaaatccgtgaaatgtatagtaaggtcacagatgatgttataaataaaacagttcgtggtgaattagaagccaataagggttctcttaataaagaaaagctattcttgtatttccttcaaggtggaattgatttatatagtggaaaaacaattaatattgataatatttcgagttatgatgttgaccatgttttgccacaatcatttattaaagatgattcaattaataataaagttttggttaatgctaaaggtaatcgagttaaaaatgacaacgttccgatggaattatttggtgccaaaatgtacccaacttggaaacgaatggttgacactgggataatgtcaaaagctaagtttaaaaatttgaccttgaaccctgataatgttgataaatttaaggcagagggctttattaatcgtcaattagttgaaactcgccagattattaaattagttgcccaaattttaaatgataaattgggtgatgatactaaaattgtgtcggttaaagctaatttgacccatgatatgcgggtattctttgattttcctaaaaatcgaaatgttaataactatcatcatgcgtttgatgcttatttatcagcgtttgttggtacttatttatataagcgttatccgaaattacaaccatattttgtctatggtgaatttaaaaaaatggataaacttaaaaacatgactagttttgatttcttacgagatttaaaacacaccgataaagttgtcgataaagataccggtgaaataatcgctgataaattagcagtaattaccaatatgaataaaatttatgacttcaaaaaagtattggtgacacatgaagtacatgaaaatagtggtgcgatgtatgatcaaaccctttatcccgctaaactagataagtcacttggtcgaaaaggcgctaaacaactaattccgaaaaaagatgatatgccaactgcattgtatggtggctataccggctcaaaagatgcctttatgtcgatcgttcgtttgaaaaagaaggatgaagtttattataaagttatcggaatccctgttcggattgccgattcagttcaacatggcaaagaagttgatgttgaagcactaacacagtttattgaaactaaatttaccaaagaaaatttaaataaaaaaactggtgaaattactcgtaaagttgagtggtttgagttggtattgcctaaagtgctatttggacaggcggtatttgatggtgggcagccatttatgctgggatcatcaacatacccacataatttaagagagctagtcttaactaaagatagtgttaaaaaaattgcaggtaaagaatcaaataagtcgtacttagatgcttatgatgaaattatggaggccatgaataagtattttccactttatgatactaataaatttagagaaaaggttattgaaggaagatctaagtttattgatttacctgataaagatgagtacgaaaacaacaaattagtacaagtaggtaagtctactattattgatcgcatgtttattggtttgcatgcaaatgctgcaagaactgatttgaaaaatattggaataactacaccatttgggtttatgcaacaagcaagtggtattaaattaaccaaagatacagttgttttgttccaatcttcaactgggttatttgaaaggaaggttgccctaaaggatttatag

SEQ ID NO: 335 - DNA, 4188 bp, Lactobacillus otakiensis DSM 19908
atggttattagttcatgcataataggtgatgtgcctaaaggggttactgggcaacattattttgaggagttttatcgtatgaaagttaataattatcacataggtctcgatatcgggacatcatcaattggttgggtcgcaatgggggaagacggcaagcctttacgcgttaaggggaagacggcaattggtgctcgattattccaagaaggcaacccggctgctgatcggcggatgttcagaacaactcgtcgccgtttgaacagacgaaagtggcggttgaaattattggatgaaatatttgatccatatattacacctgtggacagcaccttctttgcccgtttaaaacaatccaatctgtcgcccaaagattcacgtaaggaattcaagggctcaatgctgttcccggatttaactgacaaacagtaccacctagattacccaaccatttatcacttacgtcatgcgctcatgactcaggataaacagttcgatattcggatggtgtatttggcaattcatcacattgtcaagtatcgtggaaatttcttaaattcaacaccggtggattccttcaaggcatcgaaagtgaattttgatgatcaatttaaaaagttaaatgaattatatacagcaatcaatcctgaagaatctttccaaattaatctcgcaaatagtgaaaagatcggccaacaattccttgacccatccattcgtaagtttgataagaaaaagcaaattccaaaaattgtcccggttacaatggacgataaagccgtggacaaacttaacggcaagattgcttcagaaatcatcaatgctattttaggatataaatccaagctggatgtggctgtgcagtgtgacccagaagattcaaatccctgggcagtgaaatttgatgatgaagatattgatgccaaactgcagaaaattttacctgaaatggatgaaaatcagcaatcgatcattgggatcattcaagacttgtattctcaagtaaccttaaaccaaattgtcccaaatggaatgtcattatcagaatcaatgattaaaaagtacaacgaccaccatgatcacttgaagttatacaaaaagttgattggtcagatttcagattccaagaagaaaacagcattgaagaaggcatacgatcaatatgttggcaacgatggtaaagtcatcgaacaagatgacttctattcgagtgtgaaaaagaatttggatgattcagagttatcaaaacaaatcatggatctgattgacgctgacaaattcatgccaaagcaacggacatctcaaaatggtgtcattcctcatcaactccaccaaagagaattggatgaaatcatcgaacaccaaagtaaatattatccttggctggcagaatctaaccctaacaagcatgatctgcacctggcaaaatacaaaatcgaagaactggtcgcctttagaatcccatactatgtcggtccaatgattactcctgaggatcagaaaaagtctggggccgcagtcttttcttggatgaaacgcaaggaaccaggtcaaattacgccttggaactttgatgagaaagttgatcgaatggaatctgctaacaaattcatcaagcggatgaccacaaaggacacttatttgattggtgaagatgttcttccagatgaaagtctgctgtatgaaaagttcaaagtgcttaatgagttgaacatggtccgggtgaatggcgattcgctgaaggttgccgacaaacaggcgatttatcaagacctgtttgaaaactataagcacatttccgtcaagaaactgcaaaactatatcaagggtaaaaccggattgccaaacaatcccgaaatttcgggattatccgatcccgatcagttcaataattcgctcggaacatacaacgacttcaaaaagttgttcggcgataaagttgacgatccggatcttcaaaatgattttgaaaagatcgttgaatggtcaactgtcttcgaagacaagaagattttacgagccaaactcaatgaaattacctggttgaccgataagcaaaaggatgatcttgagtccagtcgttatcaaggctggggacgactttccaagaagctcctgaccggaattgtgaacgatcagggtgaacgaattattgacgagctttggaataccaacaagaacttcatgcagattcaatccgatgacgattttgccaaacgaattcatgaagccaatgctgatcagatgaagtctaccaacatggaagatgttttggcagatgcctacacgtctccgcaaaacaagaaggccattcgtcaagtcgttaaagtggtcgatgatattcaaaaagcaatgggtggtgttgcacctaagttcatctcaattgaatttacccgttcagaagaccggaacccgcggcggacaatttctcgccagcgacaactggagaacaccttaaaggacacggcgaaatcgctggtaaagtccatgaatccaaacattttgtccgagttggataatgcgtcgaggtctaagaagggtctgactgatcgtctgtacctgtactttactcaacttgggaaggatatgtatacaggtgagccaattaatatcgatgaaattagtaattatgatattgatcatatcttgccgcaggcgttcattaaggatgactcgttgagcaaccgcgttcttgtatcaaaggcagtcaacaatggcaagtctgctaatgttccattgaaactgttcggtgccaagatgggccacttctggaaacagcttgctgaagcgggcttgattaataaacataaactaaagaatcttcaaacaaatcctgacactattagtaagttcgcgatgcacggtttcatcagaagacaattggtggaaaccagccaggtaatcaagctggttgcgaatattctcggtgacaaatatcgaaatgatgataccaagattatcgaaattacagctcggatgaaccatcagatgcgagatgagttcggctttatcaaaaaccgtgaaatcaatgattaccatcatgcctttgatgcttatctgaccgcattcttagggagatatttgtaccaccgttatatcaagttgcgtccatacttcgtttatggcgacttcaagaagttcagagaagataaggttaccatgcgtaacttcaacttcctgcatgatttgacggatgatactcaagcaagaattgcagataccgagaccggtgaagtgatttgggatcgggagacttcgattaagcagttgagagatgtttatcattataagtttatgttgatttcgcaagaggtttatacacttcgcggggcaatgtttaaccaaacaatttatccagcatcccaggcaggacggaaaaagttaattccaatgaaagccgataagccagttgacgtatatggcggatatagtggcagtacggatgcatatatggcgattgtccggattcatgataagaagggtgataagtataaggttgtcggcgtgccaatgcgggcgctaaatcggctgaacactgccaaaaatgtgagtgatgccaaatatgaccaagagttgaaagaagtcttgacgccacaatttaccaagtccaagaaaaaccggaaaactggagagatcactcaaacagttgaagactttgaagttgtcttaggtaaagtgatgtaccgccagcttgtgattgatggcgataagaagttcatgcttggaagttcaacttatcaatataacgcgaagcagctggttctttctgatgaatccattaagacccttgcaagcgaaggaaaactgaatgaggcgcaagagagcgctgcgtatgataaggtttatgatgagatcttggataaggttaataaatactttgcgttgtatgataccaacaagttccgtcagaaactaagcctgggtaaggacaagtttgtgggacttcccaatcataacgtgtttgatggaagtaagaagatatcctcaggcaagcgagagattctaaacgaaattttgaacgggttacacgcaaatgccacactgggtactttgagcgatattggcttttcaacaccatttggcaagatgcaacagcctaggggaattggtctgtcttcaaatacaagcattgaatacgagtcatttactggactgtttaagcgaacaatatttttaaaagatctataa

SEQ ID NO: 336 - DNA, 3237 bp, Lactobacillus ozensis DSM 23829
atgcataaacattataaatatgcgttaggtttagatgttggagttggttcagttggttatgctctacttaaactagatgaagctgatcaaccttgtggattgcttaaggctaattcagtgacttttccaatgtcccaagaccgcacaggcaatactttggcatccattgctcgtaattatcgaagtggtcgacgtttaaaccgtcgtcgtaaattaagaaaacagttagttagtaatttattcactaaaaatggattaataaatcgtaatgatgtatatagtccttatactaagcatcccaattttgatttatatcggatttggcatgatagttttaatcagcaaatatccaatcaagatttatatcgcctactatattattttgccggtcatcgtgctttcaagtctaatcgaatccatcaactaaaaagttctggtgataaagatacgactaagctacttagttctattgacaccaataaagaatattttaacaatagtcaatataaccatttaggtgaaatgttttactgtgaccctaaatttgctcaacgtaaacacaataagggctatgatgatggatatttattcaatattgatcgtggtacgttgttaagtgaaattaaagagatattaaatgctcaatcaaaatttggaaatcctgctatcaatgatgatttcaaagctcgatacttaaaaattttgagtcaacaacgtaattttgatgttggccctagtaatccatctagatttgctttagttgacagttcaggaaatattaaattaaggaacaaaaaagataaattaaatttatcattcaaaactagtgctaaagccagttatacttttcaaaaatttcagattttacaaaagttagctaacacccgttataagttaaattcacaatccaaatatcaatctctcaatgctgaaaccattgataagatttttaataaagctataacgaaagctaactataaatatagtcaacttaaaaaagatttgaaattaccagattcagctcgctttaatatggttatgtatgaaactagcgatgataaatctgctaaacaagctgagactaaaacgtttattataaaagataatacctactacatattatccaagatattgtcagataaattgcagcatgattatacggtaattgatcaaatagcagaaatacttactaggtataccagtgatgaacctaaagcaaaggctttaaagagacaattaggtgaaaaactatctgatgaaaaaatagaatctttattggctctaaactttactcaatatggtagctattcaatcgataccatgcagtgcttaattccctatttagccaaaggatacgatgtaacaactgcgattgatgcatttaatgaagaccaagcatcattagaaaatggccatagcccattgattgatgccagtatgaactaccatgaaataattagtagtatcaagaaccctgctttattacagtcatttaccaagacagttaaggtggtcaaagcacttattcgtcgatacgggaatccatataccattcacatcgaaatggctcgtgagttgagtttaggtaacaagggcaaagctgaattaattaagaaacaaaacgaaaatcgtaaacgcaatgataaagttattaccgaaatgaaagaaaattttcccaatgtttcgattaatggtgaaaatattattaggttaaagctttatcatgaacaaaatggaattgatatttatgacggtcgaatgattgattaccaacatgtcttagataataattacgaagttgaccatatcttgccttacagcattagttttaataatagttttaataataaggtattaacctctagtcgtaataatcaactcaaacgaaatcgtaccccttatgaatggttacacaacgataaagttcgttgggatacattcacgtcgattgctgaaaatgtaagaaattatcctaaaaagaataacttattaaaaatgcactacgatgaaagtgacatgaagaaatggaaaacacggagtttaaacgatacccgttatgccacccgattgctatataactactttaaacataatgagcaatattttgatgcaaagccttcagtcatgacaatgaatggtagcatgacggcccaattacgttattattggggaattgttaagcaacgtgccgctagtgataaacatcatgcggtagatgcttgtgtgattgccacttgttctaattcaatggttaatctaattagcaagtatcatactgctcgtgaaaaagaacagttatcctctaagttccctatgccttggccagatttccgcaatgacgtgatgaatgctaagcaacagatgaacgttaaaagaatctttagccacagtattgctggtaaggtgaacgaggatggactaaaaggtgccagatacatcaacaccgataaagtagttgttatacatgaaaaactagctaatttaaagctcaaaaaagttggcgatgattatatcattgttggacacggtaattctcgctatttgcgtccagacgatttaaccagtatttcaaatcgtaatagtaaaaatgacttgaattcggtcatttatgaccatatttataatgctttatctaaggataaaaaagcttttgaaaagcaaccttatttggaatttgagcataagggacataagtatactgttagaagagtaaaagtgattagcgactataagggtggtgtcattttaaatcgcgatgcggatggtaaccctatttcagtggcaaaccgtggtaagatggtgcgcaacgatatatttaaatgtctcgataagaaggaaagagtcgtataccgttttgtccccatttatgagcatcaaattttagatacacacttacctaatcaatatgctccatttgctaaaaatatttttgtgaatgataaagaccaatttatttgttctttgagtaagggggatgcggttgaagtgaaacttagcactcctaagaaagtagaaaattgtgatgagccatatgtatgtgatcattttattggttattttgatggatcagatatcagtagtaatcgaataaaaattaatgcattagataattcttgttcaattcgcgcctctatgagtaaattgattagcattcaaaaatgtgatgttaccatttttggtagtattcataaggtgcatgagaaagtgcgtcaacctttcaacttgaagcataaataa

SEQ ID NO: 337 - DNA, 4089 bp, Lactobacillus paracasei subsp paracasei 8700:2
atgacaaagttaggtaaaccatatggcattggagtcgatatcggctcaaactcgattggatttgcggctgtggatgagaacagtcatcttattcgattgaagggaaaaacggttattggggcaagactgtttgaagaaggaaaagcagcagcgaaacgccgagcaggtcgtaccactcgccgtcgtttgagccgaaatcgttggcgactcagttttttgcgtgatttttttgaatcgcatattacgcctactgacccgaatttctttatgcggcaaaagtactcggaaatctcgccgaaggataaggcccgttacaagtatgagaagcggctttttaatgatcggacggatgctgagttttatcagcaatattcgacaatgtatcatttgcgcaatcggcttatgactgatccaagcagagcggatgttcgcgagatttattttgccattcatcatattttgaaaagtcgcgggcattttttgacgccgggagatgccaaggatttcaatacaaacgatgtggcgttagacgagatttttcctgcattgcaggatgcctacgcccaagtttacccagatcttggcattacttttgatgaggacaaagcgaatgagtttaaaacaattttgctgaatgaaatagcaacgtcaattgatacgcaacgagctttagtcaaactgttactggctgaagaagacgacaaggacatcttgaagcagcagaagcaggttttaaccgagtttgctaaagctgtggtcgggttgaaaaccaaacttaatctagcgttaggaactgaagttgatagttctgaagccactgcttggaacttttcattagggcagcttgacgataaatgggctggcattgaatcggctatgaccgatgaaggaacggaaattctggaccagattcgggatctgtatcgagcccggctccttaatggtattgtgcccacaggaaagacgctttctcaagctaaggttgatgattatacacaacatcatgaagatctccagttgtttaaagcctatttaaaacaacttgaagatgatggaacggctaaagcaatccgacagctttacgatcgctatatagacggtgacgatgctgcgccatttttgcgagaaaattttgttaaagcgttaactaaagacgtgacggctcatccaaacaccaagtctcctgaactgcttgaacgtttggcgcaaccggacttcatgctcaagcagcgcaacaaagcgaacggggctattccagtccaaatgcaacagcgggaattggatcagatcatcaaaaatcaagctgtttattacgactggctggctgcgccaaatccggtggaaaagcatcggaaaagtatgccttatcagttggatgaattgctgaattttcgaattccatattatgttggaccattggtgacggctaaagagcaaaaagcagcacaaggcggggtttttgcttggatggttcggaaagatcctgaaggtaatatcacgccttataattttgacgaaaaggtagatcgcgaagcttcggctaatacctttattcagcggatgaagacgaccgacacttacttgattggtgaagacgtgttgcctaagcaaagtttgctgtatcaacgctatgaggtgttgaatgaactgaataatgttcgtgttaataacgagaagcttagcatcgaacaaaaacaacaagttattcgagaactgtttgaacggcataatagtgtgacaattaaacaatttgccgaaaatctgcgagcgcacggtgattacgcccacattcctgaaattcgtggtttagctgatgagaaacgttttttaagttcactttctacgtaccgtcaactgaaaagtcttttacccgaggcaattgatgatccagccaaacaagccgatattgaaaatatcattgcgtggtcgaccgtttttgaagacgcagcgatctttaaaacgaaattgaaagagatcagttggctcggcagcgaagccatcacgaaactaagcaacattcgatatcgggggtggggccagttttcgcgcaagtttttaaatggtctgacccttggcaacgggcatactatcattcaagaattgctcctgtccactaacaacttgatgcagatactaacagatgaaacgctacaaaagaaaatgaccgagctgaacgctgataaattgaaaacagcgaatatcaatgatgcgattgataatgcgtatacatcaccaagcaataaaaaggcattgcgtcaggttcttcgggttgttgatgatattaaacgcgctgcggatggtcaagatcctagttggttgtacgttgaaaccgcggatggcggtggtacaccaggcaagcgcactcgtgcgcgtcaacatcaacttcaggaaatatacgcgaatgcggcccacgagctgattgatacggcagtccgcggtgaattggaagataagatttcagataaggccgatttcaatgatcgactagtgctgtatttcatgcaaggtgggcgtgatatctacactggtgcgccactaaatattgatcaactaagtagttatgatatcgaccatattctgccacaatcgctaatcaaagataactctttagataatcgtgtattagtgcacgctattatcaaccgagagaaaaacgcaacatttgcatcaaccatctatgctcaaaagatgaacgcgacatggcgtcaatggcatgaggcagggctgattagcggtcgcaaactgcgtaatctgcaaatgcgtccagatcaaatcgataagtacgcgagcggctttgttgcccgacaattggtggaaactcgacaaatcatcaagctgacggaacaaattgtagcagcgcagtaccctgataccaaaattatcgccgttaaagcaggtctttcacatcaattgcgggaagaactcgaattccctaagaatcgtgatgttaatcactaccaccatgcttttgatgccttcctagccgctcggattggtacctatttactcaagcgattccctaatttacaggctttcttcacgtacggcaagtttacaaaagccgacgtcaaaaagcttcgcgggttcaactttatccgtgatatcacacatgctgaagataaaattgtggcaaaggataccggcgaggttgtatgggacaaacaacgggatgttgatgagctggatcgaatctataactttaagcggatgttaattacgcatgaagtccgctttgaaacggcggatttgtttaagcagacggtttatggggccagggattcgaaggaggctggcgggtcgaagcagctcattccaaagaaaaaaggatatccagttgatatttatgggggctatttcagagagaacacggcctatcttgccgttgtgaaagtgaccaaaaagacagagacaatctttaaagttgtcaaaattgcaacttcccaggttgcagctttgaataaagcaagatcacggtcaactgctgaggagctttcagtacttactgaactcctaaagccaaaatttagcaaggtcgggaaaaatggtaagatcactgatacaccattcgaggttgtgcttccgcgagttccgcgtgaacaacttttctataatgcaaagtatggtttctttatggttaactcagataccatgtttcacaatttccaagaaatttgggtgtctcgttcagaccaaaaaattcttcaacaaattagaaaagccaagattgactatcctaatgttgatcaagatttagacaatctttttcacaatttagccgatcaaattgtcaaatattttgatttgtattctattgcagggtttaaagagaaaatcagtcaaagtcaaaatactttcaatgatttggcggttgatgatactgaccagagtgtaggtaagataacggtcattaatgaattgttaaagggagcacaagctaatggcatgacgggaagcctaaaagttttaaagataagtaccccatttggatttacgcaagataaaagtggtgttcttacaaaagatagttccatcatctatcagtcaccaacagggctttttgaacggtctgttcgcctaactgacctgtaa

SEQ ID NO: 338 - DNA, 4089 bp, Lactobacillus paracasei subsp tolerans Lpl7
atgacaaagttaggtaaaccatatggcattggagtcgatatcggctcaaactcgattggatttgcggctgtggatgagaacagtcatcttattcgattgaagggaaaaacggttattggggcaagactgtttgaagaaggaaaagcagcagcggatcgccgagcaagccgtaccactcgccgtcgtttgagtcgaaatcgttggcggctcagttttttgcgtgatttttttgaatcgcatatcacgcctactgacccgaatttcttcatgcggcaaaagtactcggaaatctcgccgaaagacaagtcgcgttacaagtatgagaagcggctttttaatgatcggacggatgctgagttttacaagtatgagaattgtccgacaatgtatcatttgcgcaatcggcttatgactgatccaagcaaagcggatgttcgcgagatttattttgccattcatcatattttgaaaagtcgcgggcactttttgacgcctggggatgccaaagattttaatacaaacaaggtcgcagtaaacaagattttccctgcattgcaggatgcctacgctcaagtttatccggatctggacatcacttttgatgagaacaaggtgaatgagtttaaaacagttctgttgaatgagaaagcgacgccaagtgacacgcagcgagctttagtcaatcttttgttggctaaagaaggcgacagggacatattgaagcagcagaagcaggctttaactgagtttgctaaagcagtggtcggactgaaaacgaagctcaatgtggcgctagggaccgaagttgatagttctgaggccactgcttggaacttttcattagggcagcttgacgataaatggacaggcattgagtcagccatgactgatgaaggtaccgaaattctggaccagattcgtgatctttatcgagctcggctccttaatggtattgtgcccgcaggaaagacgctttctcaggctaaggttgatgattatgcacaacatcatgaagacctcgaattgttcaaagactatctaaaacaacttgaagatgatggaacggctaaagcaatccgacagctttacgatcgctatatagacggtgacgatgctaagccatttgtacgtgaagattttgttaaagcgttaactaaagaagtgacggctcatccaaacgccaagtctcctgaactgcttgaacgtttggcgcaaccggacttcatgcttaagcaacgcaacaaagcaaacggggctattccagtccaaatgcaacagcgggaattggatcagatcatcaaaaatcagtctgtttattatgactggctggctgcgccaaatccggtggaaaagcatcgaaaaagtatgccttatcagttggatgaattgcttaattttcgaattccgtattacgttggaccattggtgacggctaaagagcaaaaggcagcacaaggcggggtttttgcttggatggttcggaaagatcctgatggtaatatcacgccttataattttgacgaaaaggtagatcgcgaagcttcggctaatacctttattcagcggatgaagacgaccgacacttacttgattggtgaagacgtgttgcctaagcaaagtttgctgtatcagagttatgaagtgcttaatgagttgaacaatgttcgggttaatgacaataaattaagctttgaccagaagcagcaggtcttaggtgaactttttgaaaggcataacaccgtcactattaaacagtttgttgacaatttacttgctcatggggattatgaccgcattcctgaagttcgtggtctggctgatgagaaacgctttttgagttcgttgtctacttataatcagcttaaggggattttgcatgaggcaattgacgactcggataaacaaactgatatcgaaaatattattgcttggtcaacgatttttgaggataaggcgatttttaaaacgaagcttaacgaaatcagttggctaaatgctgggatgattaacagtttagccaatattcgttaccggggatggggacagttttctcataaactattaaatgagttaacgctcagtactgggcgcacagtttttgaagaactacttatatctagtcataacctgatgcaaattttgacagacgaggtactgaagcagaaaatcgccgagttaaatgctcatgaattaaaagcatcaggtatttatgccgcgattgatgatgcttatacgtcaccgagcaacaagaaagctttgcgtcaggtacttagcgttattgatgacatcacaaacgctgctgggcaagctccaaattggctctatattgagacagcggacggagacggagtacccggaaaacggacgaattcgcggcaacgaaaaattcaagagatctatgcaaatgctgcccaagaactgattaccggcagtgttcggggagaacttgaagataaaattgccagtagagctgactttacggatcgcttagtgctttattttatgcaaggcggccgtgacatctacacaggcaaaccattgaatatcgataatctaagtagctacgatattgatcacattctccctcaatcgttgattaaagataattctttagacaatcgcgttcttgttcatcccctcgtcaatcgcgaaaaagatacaatcttcgcttcgacgcgattcgccaaacaaatgaatggaatgtggcgtcaatggcatgcagcgggattgattagtagtcgaaagctgcgaaacttacagatgcggcctgacgaaattgataaatacgcgagtggatttgttgctcggcaactggtcgaaacgcgacaaattatcaaactcactgaacaaattgtggcggatcaatatccagacactaagattatcgctgtcaaagcgggactttcatctcagttacgcaaagaactggactttccaaagaatcgcgaggtaaatcactatcatcacgccttcgatgccttcttagctgcgcgtatcgggacgtatctgctcaaacggtatcctaatcttgaacccttctttacctatggaaaatttaaaaagacggaagtaaagaaattaaagagcttcaactttattcgtgacatgacacatgcaaaagataaaatcgttgccaaagagaccggagagattgtctgggataatgcaagtgatatcaatgagttggatcgtatttacaatttcaaacgtatgttgattacgcatgaggtgcggtttgagacggcaagtctatttaaacaaacactttatgcagccaaaaattcaaagaatcgcggcggatcaagacaactaattccaaagaaaaaggggtatttagttgatatctacggaggatatacgcaagaaacgggtagttatttatctgttgttcgactaacaaaaaaagcgatgtacgctgtcgtgaaagtatcgacgagagatgctgctaaattggcagttgctaagagtatttctgagcaaaaggaaaatgaaacgttaaaaaagattattgatggaaagctttcaaagacaagcaaaaagggaaaaaccacacatcaattatttgagattgttttacctcgggtggggcaaaagaccttatttaaaaatagcaaatacaatcaatttctagttaattcggatacctacatgcacaattaccaagaactgtggatgccacgtgagtatcagagaatgtggaaagatattttgctatctaatcacggtgatgctcagttagaaggccagttagatcaaattttcaagtttattgtttctcaagtgaacagctactttaatctatatgatattaatcaatttcgtaaaaaaatagccgacgcaactgataagttcgctaaacttccaacgcatgatacagataacgcacgagggaaaattgcgacaataggtcaattgttaattggccttcaagcaaatgctatgagaagtgatttaaggaatctcgatataaaaacacctttcggattattacagattggtacaggaataaccttagacttggacacctccattatttaccagtctccaacaggtttgtttgaacgagaagttcccttaaccgatttgtaa

SEQ ID NO: 339 - DNA, 4107 bp, Lactobacillus paracollinoides DSM 15502
atggataagaaatatagcattggcttagatattggtaccagctcaatcggatttgtcggggttgatgaaaacggttggccactaaatatcaaagggaagcgggcaattggtgcacatttgtttagagaaggggaagcggctgctgaaacgcgtggtttcagaacgacacggcgccggtacaatcgccgaaagtggcgattgcggttactcagagagatatttgatgaacctatcagtcgggtagatcctactttttttgctcggatgaaagaatcctcagtatctccaaaggatcctaactatgacggtttagcgaaagaaattttgattccaagagataaggatggaaagattctttatccgacaatctatcatttacgtcacgcactgatgtatgaagatcaccaattcgatattcgtgagatttatttagctattcaccatatcgtcaaataccggggccactttttactggacggtgcggctaagaactttgagtcctctaatcttgatctaaaaagtgacattcacgaaataaatgctattttagtaggcatttttggtaatgaacaggtacagtttaatgatcaatacgttgaaaaattaaaggaagtgctactggatagtacccaatcacgttcagatcgacagaaagctgctgcaaaattgttgttgccaacaaatgatttagacaaagatacaacgaaaattctaaaaacagtttcaactgagattacgaaagccatcacaggattgaaagcaaaattttttgtgataaccggcaatgatatcgcaaaagaccaacaaaaggattggacttttagcattgatacattggacgaaaaaatgagcgttattgaaccctcattctcagaaaagaacttttccttaataacaattctacagaaattgtattctagtgtgacgctggctggaatagttccaaatgggcttagcctatccgaagcaatgattcagaaatatgataggcatgcgtccgatttagttttgctcaaaaagtattgggacactaagccaaaagttttgaagcaccagcttcaaaacacttatgcagaatatattgaaatccatcaggtagttgatgagttctacagtgatcttagtaagttaattaaaaatgatgatgacactctagcgcaagaaatcaagtctaaaataacgattggaaattttttgccaaaacaacggacaaccgaaaatggtgtaatcccatatcaattgcaacaaagagagttagatacaattataaaaaatcaacaagaatattatccatggttagctgaggagaacccagtcgctgaccatcaaattgcatttccatacaagttagatgagctagtcggattccgaattccctactatgtaggaccgatgatagcgaaggaagatacttccaattcaaagaatagtaaatttgcctggatgattcgtaaacagagtggtgaagtaacgccttggaacttcgatgaaaagattgatcgcacagcgtcagctactgcatttattgatagaatgacaactaccgatacttatttaattggtgaggatgtattgccaaaacaaagtttaatctatcaacgttttgaagtgctaaatgagttaaataagatttctatcgatgggcaacccattactcgtaaacaaaaacagagtgtatatacacacgtatttgaaaagaagaaaacggttcaggttaaggatgttcaaaaatttttggttagctcaggagaggttatgagtttgccaaagattggtggtttagctaatgaaaaacaattcaatagttcactatcaacgttatatgattacaataaaataattcctgacgcacttgaagatagaaataaagttgatgatatcgaaaaaataattttatggtcaactatttttgaagacaactcaatttttgtggaaaaactggattcaattgactggttaactagcagtcaaaggaaaagacttgctcaaaaaagatatcgtggttggggtcgattgtctttacgattactcacaacttttaaaaataaagatggttacagtatcttagatgaactgtggaactctaatcataattttatggaaattcaagcacaatctgatttttctgaacaaatcgcaacagcaaacaataataatttgagtcaagttcttcctgccaaatgggaacctggacgcaagaatttggcatcgttggatgaattcatttctaatctgtatacttctcctcagaataagaaggccttgcgtaaggctatcagagtggttcaagatatgatgacagcagccggccatatgcctgaaaaaatctttattgaagtcgcacgtgacacgtcaaatagtcaccaacaaacaattgctcgccaaaggcaattacaacagctttatcaatcggaagataaggaagtcattgattctagtgttcgtagtgagttagacgatattttaaaaaatcgagctaatatcaaagatcaattattcctgtatttccaacaaggtgggcgggatctttatacaggaaaagcaattaacattgacaaattatcgctatatcatattgatcatatattgcctcaatccttggttaaagatgattcattagacaatcgcgttcttgttagtcaaaaaaccaatgaggacaaaggtgttacattcgtctcagataaatacatgaataacatgttgccaacctggaaacgatggcatgaaatgggactgatttctgccagaaaattaaaaaatctaacgatgagaccagatgaaattgacaaatatgcacccggttttattcaacgacaattagtagaaacaagacaggttacaaagctagttattgaacttcttgatgctttattaggaaacagtcaaacagaaatcatcacaattaaagcgtcactttctcatcaattcagacaacagtttgatctcgttaagatccgtgaagtaaatgataatcatcatgcatttgatgcttttctagctgcgcgtatcggcacttatctatataaaaggtatcccaaactgcgaccatattttgtgtacggtcagtatatgcaaaatcataaaaatttaaaaagtatcaatctaataaagacgcttgattctgataaagcaattgttgatgaaggtactggagaaattctatgggataaaaagtcggacttagctaaaatgataaaaatatataattatcaacgtcttttaatcacccatgaaagtcgtacaagcttcggggcaatgtataagcagaaaattttaaaggcaaccgacgcaaaacaaaacggtggaggtttcaagttggttccaaccaaacgtaatcggccagttgatatttatggtggttacactggtcagactgccgcctatttgacaattgtcagagtctattcaaaaaaaacatctgaacttcgagttttgccaatctatacaaataaggtacagcaaatagagaaagcgatgacgcaaggcgataaagctactatgttagcatttaaaaaagtcattgcacctcaattaggtaaagaaaataaaaagacacatgaaataaaaatccctgaatttgatgttgtgattcccaaggtcttactagatcagttagtgattgatgatattgccggaagtccacaccgatttagacttggaacagatacgtattatcataattctcaacaattatttttaccgttatcgatgcaaagacaactaatggatcgtgagtcagatgataaagtataccttgatattttcaatgatgtacttaagcaagtagatagttattttaatttgtatgatgtgaatggctttagagcagctctgcaaaagagtaaaaaagccttcgagcaattaccgattaatgattttcctaaagatgtgccagacaataaaaagaagaaaggaaagcgttcaattttaaaggagatttttattgggctacatgcgaatgcaacattaggcaacttaaaacaaatgggcattaaaacagattttggaaaattacaaaaaagtaacggtttacggattactgagaattgtaaaattatccatcagtcgccgactgggttgtttgaacgaatcgtaccgattaaataa

SEQ ID NO: 340 - DNA, 4161 bp, Lactobacillus parakefiri DSM 10551
atgtgcctgaaggagtttactgggcaacattattttgaggagttttatcgtatgaaagttaataattatcacataggtctcgatatcgggacatcgtcaattggttgggtcgcaatgggagaagacggcaagcctttacgcgttaaagggaagacggcgattggtgcccgactattccgagaaggcaacccagctgctgatcggcggatgttcagaacgactcgtcgccgtctgaacagacgaaagtggcggttgaaattattggatgaaatatttgatccatatatcacacctgtggacagtactttttttgcccgtttaaaacaatctaattggtcgcccaaagattcacgtaaggcattcaaagactcaacgctgttcccagatttaaccgacaaacagtaccacctcgattacccaaccatttatcacttacgtcatgcgctcatgactcaggataaacagttcgatattcggatggtgtatttggcacttcatcacattgtcaagtatcgtggaaatttcttaaattcaacaccggtggattccttcaaagcatcgaaagtgaattttgatgatcaatttaaaaagttaaatgagttatatacagcaataaatcctgaagaatctttccaaattaatttcgcaaatagtgaaaagatcggccaacaatttcttgacccatccattcgtaagtttgataagaaaaagcaaatttcaaaaattgtcccagttacaatggacgataaagccgtggacaaacttaacggcaagattgcttcagaaatcgtcaatgctattttaggatataaatccaagctggatgtggccgtgcagtgtgacccagaagattcaaaaccatgggcggtgaaatttgatgatgaagatattgatgccaaactgcagaagattttacctgaaatggatgaaaatcagcaatcgatcattgggatcattcaagacttgtattctcaagtaaccttaaaccaaattgtcccaaatggaatgtcattatcagaatcaatgattaaaaagtacaacgaccaccatgatcacttgaagttatacaaaaagttgattggtcagatttcagattccaagaagaaaacagcattgaagaaggcatatgatcaatatgttggcaacgatggtaaagtcatcgaacaagatgacttctattcgagtgtgaaaaagaatttggatgattcagagttatcaaaacaaatcatggatctgattgacgctgacaaattcatgccaaagcaacggacatctcaaaatggtgtcattcctcatcaactccaccaaagagaattggatgaaatcatcgaacaccaaagtaaatattatccttggctggcagaatctaaccctaacaagcatgatctgcacctggcaaaatacaaaatcgaagaactggtcgcctttagaatcccatactatgtcggtccaatgattactcctgaggatcagaaaaagtctggggccgcagtcttttcttggatgaaacgcaaggaaccaggtcaaattacgccttggaactttgaccagaaagttgatcgaatggaatcggccaataagttcatcaagcggatgaccacgaaggacacttatttaattggtgaagacgttcttccagacgaaagcttgctgtatgaaaagttcaaagtgcttaatgagttgaatatggtccgggtaaatggtgactcgttgaaggttgctgacaaacaggcgatttatcaagatctgtttgaaaattataagcacatctccgttaagaagatgcagaactacattaaagataaaactggattgccaaacaatcctgacatttctggtttatccgatcctgatcattttaataattcattaggaacttacaacgacttcaaaaagctcttcggcgataaagttgacgatcccgacctccaagatgattttgagaagatcgttgagtggtcaactgtctttgaagacaagaaaattctgcgggccaaactcaacgaaatttcatggttgtctgataagcaaaaggatgatcttgaatccagtcgttaccaaaggtggggccgactttccaagaaactcctgactgggattgtcaacgatcagggtgaacgaatcattgacgaactttggaacaccaacaagaacttcatgcagattcaatctgacgatgactttgctaaacgaatccatgaagccaacgccgatcagatgaaggcaactgatgtggaagacgtcttggcagatgcatacacttctccgcaaaacaagaaggccattcgacaagtcgttaaagtggttgatgacattcaaagagcaatgggtggtgttgcacctaagttcatctcaattgaatttacccgttcagaagaccggaatccgcggcggacaatctcacgtgaacgacagctcgaagataccttgaaagatactgctaagaccttggttaaatccatgaaccctgacattctatctgaattggataatgcttcgaagtctaagaagggtctgactgatcgcctgtatctttacttcactcagcttgggagggatatgtatacgggtaagccaattaatatcgatgaaatcagtaattatgatattgatcatattttgccacaggcgtttatcaaggatgattcattaagtaaccgggtgcttgtatcaaaggcagtgaacaatggtaagtcagctaatgttccactgaagctgtttggcgtcaaaatggctcacttctggaaacagcttgctgaagcgggattgatcaataaacgcaaactaaagaatcttcaaacgaatcctgataccattagtaagtttgccatgcacggttttattagacgacagttagtggaaaccagccaggtgatcaagcttgttgcaaatattcttggtgacaaatatcgcaatgatgataccaagattattgaaattacggctcggatgaaccatcagatgcgagatgagttcgcctttatcaagaaccgtgaaatcaatgattaccatcatgcctttgatgcttatctgaccgcattcttaggcagatatctatatcacagatatattaagctacgtccttacttcgtttatggtgacttcaagaaattcagagaagataaggttaccatgcgtaatttcaacttcctgcatgatttaacagatgatacccaggcgagaattgctgacaccgaaactggtgaggtaatttgggatcgcgaaacttcaattaagcagttgagggatgtttatcattataaatttatgctgatttctcaagaggtatacactctccgtggggcaatgtttaaccaaacaatctatccagcagacgaggccggacggaaaaagttgatcccaacgaaagcagataaggcggttgatgtatatggcggatacagtggtagcaacgatgcatatatggcgattgtccgaattcacgataagaagggtgataagtacaaggttgtcggcgtgccaatgcgggcgctggatcggctgaatgctgccaagaatgtgagtgatgccaaatacgaccaagtcctcaaagatgtcttgacgccacaatttacaaagtccaagaaaagtcggaaaactggggaaatcagtcaaacagttgaagactttgaagttgtcttgggtaaagtgatgtaccgccagcttgtgattgacggtgataagaagttcatgcttgggagttcaacttatcaatataatgccaagcagctggtcctgtctgatgaatccgttaagacccttgcaagcaaaggaaagctggatgaggcacaggagagtgctgcgtatgataacgtctatgatgagattttggataaggttgatcggtattttgcattgtatgatcaacgtaattatcggacgaacctacatgaaggggaacaaaagtttattggattaccactacatgatacttttgatggaagtaaaaaagtggccaacgggaagcgcgaaaccatctcggatattttaaatggcctgcatgcaaatgcaactatgactaatctgaaagttcttggtatatcctcaccgtttggaatgtttcaatcacatggtcctattaacttgaatcctgaaactataatcttatgtcaatcaccaactggattatttgaacgtcgtattattttaagagatctataa

SEQ ID NO: 341 - DNA, 4086 bp, Lactobacillus pentosus KCA1
atgaacgaaccgtatggtgtgggcttagatatcgggacgaattcggttggctggaccgtcgtcgatatgaacggacgtgttagaaaggtcaagggaaagacggctcttggggcacggttatttaaggagggtgcaactgccgaggatcgtcgtggctttcggacaacccgacgccgtttaaagcgggtaaagtggcggttgcgattgttacgtgaattttttgatcaaccaatcagtaaaatcgatcctaacttttttgcccgacgtaagtattcggatatctcgcctcgagacccgaactacaatggattagcaaaaacgctgttcaatgaccggaccgataaggaattttatgatgactatgccacaatttaccatttgcgagacaagctgatgacgagcaaccggaaatttgacattcgggaaatctacttggcaattcatcatattgtcaaataccgcggaaattttttgcgtaccggaccagccagtcaatatggtagtgcaagcttgcatttagcgactagcttccagaagcttaatgatctgtttgctcagtccgaggagacgttaaatcttaagttggtaactgatgaggcactgcttcaacaaatccagcagatcttagtacggacagacttgtcacgttcggaacagcaaagacaaatttggccactcatggcagttttgacgggagcgagcgctgctgaaaagaagcgtcaaaagaatgttgtcgttgaactgtcgaaggcgctggttggccttaaagcgaagatgaacgtggtgacattaacggaagtcgatgccgcagtagtaaaggattggacctttacgatggaggaaagccaagacaagcttccggaaattgaagaacaactaagcgaagttggacaacagattatggatgaagtgatccaactatatgctagcgtcaacctcgcgcaattgattccagcaggtaagcgtttttcacaacacatggttgagaaatataagcatcatgaaaagaatctagagctgttaaaagcttatattcactcacagtctgattcaaaacgtgggcgtgagattcgcgcaacctatgaccgatatatcgatggtgtcgatagcaaaccagttacgcaggaaatgttctacaaagatttaatgaaatacgttgaggctgatgctacatcgaatcatctggcagcagagattaaagatgaaattgactcggaacaattcatgccgaagttgcgtaccaagcagaatggctcaattccatatcaagtccaacaatatgaattagatcaaataattagtcatcagaaaaagtattatccatggcttggtgaagaaaatcccgttgctgaacggcgcggcaagttcccatataagttggatgaactagttggttttcgggtgccttactatgttggaccactcattacaaaagaggaccaacaagccacttctggcgctgggtttgcgtggatggtccgtaaagcagatggtccaatcacgccatggaattttgatcaaaaagttgatcggattgcttcagcaacggcgtttattcaacggatgcaaacaacggatacttacttgattggtgaggatgtcctcccagcacgtagcctgatttatcagcgcttcatggtgctcaatgaattgaataatatgcgagttgaggatcgaaaactggcgccgcaacaaaaacaacgtttgtataatcaagtgtttaagcaacatcaacatgttagcgtcaaaaatattcagcagaatttgatggatgccggtgagtatcgaaaaacgccccaaataacggggctcgctgaccctaaaggattcaatagctcgctatcaacgtatcatgatttcaaaaagattttgcttgaagcaatcgccgacgaacataagcgggctgatattgaaaaaattattttatggtcaacgacgtttgaagacagtgccatttttaagcagaagcttgaagaagtggcctggttgacggatgcccaacgtaagcagcttagtggactgcggtaccgtggttggggacagttgtcgcataaattactgaccgcctttaaggatgacaaagggcgttccatcatggatggcttgtgggagaccagcgataactttatgcagctgcgtaagcaacctgcaattgaaacgcagattaaagaggctaatcaagctaacctaactgatgcggatatccaagataccatcaacgaattgtacacgtcgccgcagaataaaaaagccattcgtgaagtgatgctggtactagacgatatcaagaacgcgatgcatgggcaaacaccaagttggattttcgttgaagcagcgcgtggcggtggcgttgcgggtcggcggacgcaatcacggtccagccaaattgtggaagcttacaaaggcacagccaaagagatcgttagcgaaaaagttcagcatgaattgaatgaaaaaattaaagccaaggctgattttaatacgcggcttgtgctctatttcttgcaaaatggccgcgacctgtacaccaatgaagccattaatattgaccggttatcagagtatgatatcgaccatattttaccgcaatcattagtcaaagatgactcgttagataaccgggtgctgactagtgcgcggattaatcgagagaaaaacgatacgtttgctagtgagaaattcggtcgtaagatgggcgcgcaatggcgagaattacatcggaatggcttaatgacacaacgcaaactcaagcacttgctgatgcgaccagatgagattagcaagcatgcgacggactttatcaatcggcaattggttgaaacacgtcaagtcatcaagctggtggaagaattaatcagttcggaatacccagcagcgtcaattgtggccgtcaaagccaatctaacgcaccaattccgacagacattcaactttccgaaacttcgtgaagtcaatgattatcatcatgcgtttgatgcgtccttaacagcgtttatcggaatgtatttattgaaacagtatccgaagttggaacgattcttcgtttatggcaagtttgctaagcagccgattaatttgacgcggttcaatattattcgcaagctggcagttgcggagaaaccaattgccaatatcgaaacaggtgaaattctgtgggataagacagccgatattaagtattttgaaaagctgtacaactacaagcgactactagtgacgcatgaggtgcgagagaattatggtgcgatgtttaagcaaacattgttcaaggcatcttataataaatcgaagacactggttccaaagaaaaatcatatggagacaagcgtatatgggggctattctaatcaagagacagcttatctggctattgttcgcattccgtttaaatcaggctttaaatttatagttgttggtattcctactcgaatggtagctaaaattaagcactatcagagcctgggtgcaactctcaatcaagccacacataaggtgattgagcccaagtttacgaaaatcagtcgtaaaactaagcagacggtgataagtgattatgaagtggtacttccaaaagtatacttggatcaagtcgttcgagatcaagtaaagggccaaatgtatcgtttctctctaggatcagataaggaatatcataatgtgcaagaattatatttgccattgtcgattcaacaggcatttgttggacactatgatgagtctgatgatcaacgttcaaacgatttagtaaaagtttatgatgcagcgttgaaacaactgcaacgatatttcccactgcatttgtcacgaaactttgaccaggtggcaagtcaagcacatcaaagttttgaggggctgaaaaacaatgtgcaaacaagtgataaacaattgggtaagaaagaggtgctcaatagtctatttgttggtttgcacgcaaatgcaacaaggtcaaacttgagtgtgctcgggatgagtaaagattttggacggataaaatcaaacggcattacattaaccgaccaagcagaaattatttatcaatctccaacaggattatttgagcggaaagtggcactaaaagatttgtag

SEQ ID NO: 342 - DNA, 4149 bp, Lactobacillus pentosus IG1
atgaagaaaatagttaattataacctcgggctagatatcgggactagctcaattgggtatgcggctattgatgatcaggggcgtccagtacggcatcaaaataagacggttatgggggtacgactttttaaagaaggcaagactgcagaaagcacgcgaatttttcgtggcactcggcgacgcttgagtcaccggcactggcggttaggttatttagatcgaatctttgacaatgagattgccaaagtggatgaaaattttttaccacgtctaaaagcgtcaaagcgtgctcggagtgatgaaaaacggtcatttagaggatcattgctatttccggaaaccggtgatgacgcctattatcaaaagtatccaactatttatcacttgcggtacgcgttaatcacccaaaagaaacaatttgatattcgactcatatatctggcgttacatcacatgattaagtatcgcggaaactttctggacacaacgcctgttagtgcattcaatattcacgatattgatctgactgatcagtttgcatcattaaatgattgttatcagttgcttgatatggattttgagtttcagtttgacctcaacaatattgagcaagttcagaagttgctgttagatgaaacactatctaaaacgaaacgtcaggcggctgtgtccaaggttctggttatgtcaacagggaacaaagcctttgatgatcagcaaaatgggattgctagcgagttcatcaaggcgttgttgggtggaccatttgacttatctaaaattttgaacttgtcagtcgctgacgtaaaaagttggaagcttcatatgaccgataaagatgttgatgacacgctcaatagcttggtagaagagcttgatgaaaatcataagcagattgtgaatttattgcagatgatctattcgcaagtaatgatgctagggctcctaaatggtcagcaatcaatatcagcatcgatgattgaaagatacgatgatcatgcaaagcactgggcagccttaaagaaattgctgcctgcattaggtgagcaagaacagtcgacgattattcacgcgtatacggcctacacagggcacagtcgcactaagcaactatctcgagctgaattttacacaaaggtgaactcaattcttaaaaagcatgaaaacattgcggaagccacaggtctcatagagctaattgaccgcaatgaatttatgccaaaacagcgtgatgcagtcaatggggtcattccacaccagctacatcaacgtgaattacaactaattattcaaaaccaacagaagtactatccgtttttagcggctaaagcttatccggatgctgatgaaacgatgattgagcagttgctttcatttcgtgtgccttactacgctggtccattagttgaccgggattttattaatgagtctagtgatcaagaacaggccatgcagaacacgaaattttcttggttaaagcgtcgtgaagctggcgaaataaccccatggaattttgagcagaaagtggatgttcaagagaccgccaaccggttcattaagcggctgacgactaaggatacttatttgatgacagaggatgttttgcccaaagagagcttaatataccaacgctttgaagtgctaaatgagcttaatgcgattcggattaatgatcgtcggttgacggcggaaaataaacaattagcttttcaacaattatttatggctggcaatactaaaaacgtttctatcaaaaagtttcgtaacttcgtgtttgatagtctaaaatttccggaaaaagtaaaaatcaccggctttgcaggtcagcataattttttggcaaaactatcaacttaccatgactttaagaaaatttttggtgaacgagtcgatcatactgatttacagcctgatttcgagcgaatcgttgagtggtgcacgatttttgaagaccggcatatctaccgagagaagctcaaggaaattcaatggttatcacagtcagagattgatcaattggttttgattcgtaatcatggatggggacggttatcaaagcggctgttgactggcatacgagattcagatgggagaacagtcatggatcaactttggtttggaactgataacttcatgcgtattatttctcaatcagattttgcggcagctattgcgaatgaaaatcgaactcaactgaatcagcatggcctggaagatgtactggattctgcctttatgtcacctcagaataaaaaggctattcgacaagtgctcaaagtagttgatgatattgagcagactttagggtgcccacctaagaaagttatgattgagtttacgcggagtccagacaagaagaagcaaagaaccgtgacgcgacttgaaaaagttcaacaggcgtacaaagcagttgctgatcaattggcggggcagtcgattgtgagcgaactagatcagtatgctaacacgcacagtaaactatccgatacttattatctgtacttcatgcagttgggacgcgatctatatagcggaaagccaatcgatattgattcgccgatgctggatgacgatcacattttaccgcgtgccttcatgaaggataactcgttggataaccgtgcattgacggaaaaaccaatcaacaacaccaaagcagccaaatttccatccaaagtgttcggacagcaaaaggaggttactgatttttggaagttactacgacgctgtggcttgatgagtaatatcaaagagaagcatttgtatttggaccctgacaacgtagataaatggacacgaaggggatttattcaccgacagttagttgaaacgagtcaggtaattaagattgttgcgaatatcttgaacgatcggtatcaacaaagtcaaacggaagtgttggaagtgcccgcacgattaggtacggaactgcgcgaatgttttggctggtataaagttcgggaggtcaatgactatcatcatgttttcgatgcctatttagcagcctttattggcaattatctttatcgtcgataccctaaactgcaaccttattttgtttatggtaattttgccgaattaaacaaggcacaacttaagaatatcaagagctttaacttcttgtataatattactgataataagcgtgttgtcaaagatattgagactggccaaaccctttgggatgatcagattcgccaacagattcagcatatttatgagtataagtatatgttgacttcccatgaagcattcacacagcataaggaattgtatggacaaactatctatcctagacgtgaattcaagcctggaacattgaaagctatcaagcaagatcagccccaggaattgtacggtgggtataaaaatttaacggctgcttatatgtgtatcgttaaaattcaagcgaggaaaagaagggcggctgagtatcgtgttgtgagggtcgcaactgagagtctatcagcgttacagcaagctaagcgtctaggggtgcaagcttacgagcggtgcttgcggcaagaattggttcgaaataatgaaatcttgcggacgaatgcggatccaaacagtgcacctcgcgaatttgaagtgttgttggatcgcgtcttgtgccatcaaatgattatcagtgatgggcagaagtatctgctaggcagccatgcttataagataaattgcatgcaattggttttgtcaaataattcgatgaagatactgagcacaagcattgtgaaattgaaacaaatgactaatgaaccactagtacaggtttatcgcgaaattttggatgtcgttaataagtattttaccttgtatgatgttaacagcttccgtgagaatttaaatcagttttttgataagttcaggacattgcccataacgaatgagtatgagtctagtaagtctggaaaaaaactgatccaccgtggacaactagaaacgttaaccttaatcttaagggggctgcatgctaatagtgataaggttcaatatggagatcaatctaccctgcttggaggatttcaaactaaagacggaattaagctatctaaagatagtgtgattcagtatacgtcgccagccggattgaatgtgcgaactgtgaaattacgtgatttggagcaaaaggaggctcaaaaatag

SEQ ID NO: 343 - DNA, 4077 bp, Lactobacillus plantarum EGD-AQ4
atgaaagaaccatacggtgtaggcttggatattggtacgaactcggttggctggacggttgtggatgcaagtggtcatgtcagaaaaattaaggggcagactgggattggtgtacggttatttaaagaaggggcagccgcagcagaccggcggggatttcgaacaacgcgtcgtcggttgaaacgggtgaaatggcggttacgattactacgcgaattctttgaccaaccaatcagcaaggtggatatcaatttctttgcgcggcgcaaatattcggatgtttcacctcgtgatcctaattataacggtcttgaaaaaacgttgtttaatgatcggagtgatcaggatttctatcatgattatccaacgatttatcatttacgtgaggcgctgatgactcagcaccgcaagtttgatgtgcgtgaaatttacctagcgattcaccatattgtcaaatatcgcggcaattttttgcgtaatgatgcagcgacagcgtatcgaagtgggacacttgatttacagcagcactttgaaactttgaatcatttgtttagtcaggctgatctggagctgaacttgaacctgacaaccgatgtagcgttgcttgacagcatcaaacaaacattggtacgaactgatatctcgcgtagtgaccgccaaaaattaattatgccactattagcagttttaactggcgcgactactgcggaaaagaagcgccaaaaggcagtggtaacagaatttgcgaaagccctcgttggaaataaaaccaagattgatgtgctgactctaacggacatcgacgctactgaagcaaaggattgggcctttagtttagaggaaaatcaagacaaacttcctggcattgaagaccgttttagcgaagtgggccaacaaattattgatgaggtaattcggttatacgccagcgtcaaccttgcacagcttattccagaaggtaaacggttctcacagagtatggttgagaagtataaacgccatggcgaagatttgaagttattgaaagcgtatattcgctctcagtcagacgccaagcgcggacgggctattcgggcaacctacgatcaatatattgatggtgtgaaaagtaaacaggtgacgcaagaagcgtttcaaaaggccttgggaaaatttgttgacgccgatgtagatttgaatagttgggcagctcaaattaagcaagctattgactctgaacaattcatgcctaaattgcggacaaagcagaatggagctattccttatcaggttcaacaaaatgagctagatcaaattattagtaatcagaaggaatactacccgtggttgggtgaagaaaatccggtcatcaagcgacgcggtaagtttccatacaaacttgatgagcttttcggtttccgggtgccttattatgttggaccgctgattactaaagaaatgcaggcagcaactgccaatgcaggttttgcatggatggtacgtaaggctgatgggccaatcacgccatggaattttgatgataaggtcgatcgggtggcctcggcgaccgctttcattcagcggatgcagacgacggatacgtatttgatcggtgaggaagtgctacccgcacgcagcttgatttaccaacgctttatggtgctcaatgagctgaataatattcgagttgatgatgggcaattaacaccccggcaaaaacaacgactatataaccaagtgtttaaaaaacacaaacgagtaacagctaagaatattcaagacaatttagttgcagcgagagagtttcccactgcgccacgaattacggggcttgcggatccgaaagtattcaatagttcgttatccacgtatcatgatttgaaacaggtgttgcctgaagctatgtcagacgtgcgtaagcaagctgatattgaaaaaatcattttatggtcaactatttttgaagatagtacgatttttaagcaaaaactgacagagatttcctggctgacagcggcccaacttaagcaactaggtcaattacgatatcgtggctggggacaattattacgaaaattattaacaggtctcaaagatgataataatcgttcaatcatggacggcttgtgggagacaaacgctaatttcatgcaattacgaagccaacctgccattgagaatcaaattaaatcggcaaaccaggccaacctaacaacggcggatcttcaagataccatcaatgaattatatacgtcaccgcaaaataagaaggctattcgcgaagtgatggtggtgttagctgacattaaagatgcgatgcatggtcaaacacctaactggatatttgtggaagcggctcgtggtggtggcgttgctggtcggcggacacaatcacggtcaaaacaaattgttgcagcctatcagggaacagctcaggccattgtcagggatcaagtccaacgtgaattaaaagagaaaatcaagaacaaagctaatttcaatacgcggctcgtactttatttcctacaaaatggccgcgatttgtataccggtgatgcgattaatatcgatcgattgtcagaatatgatatcgaccacatcttgccacaatctctggtgaaagatgactcattagataatcgagtactgacaaatgcacgcatcaatcgtgagaaaaatgatacgtttgctagtgaaaagtttgggaaaaagatgggtgctaagtggaaagagatgcaccgaatggggctgatgaccaaacggaagcttgaccacttactgatgcgtcctgatgaaatcagcaagtacgcgactggttttattaatcggcagttggttgagacacgtcaggttatcaaactagttgaagagctgattaatgcagaatatccatccaccgctattgtgtcggttaaagcgaacttgacacatcaatttcgacaaacgtttgattttccgaagattcgtgaggtcaatgactaccatcatgcatttgacgcagccttaactgctttcattggcacctatttgttgaagcgatatccgaagctggaacgattcttcgtctacggtaagttcgctaaacagccggttaacctaacacgtttcaatgttatccgaaaactagctaagactgataccccaattacggatatcgatactggtgaagttttgtgggataagttaaccgatattaaatattttgagacgctttatgattacaagcgattattggtgacgcgtgaggtatccgaaaactatggggcaatgtttgatcaaactctcttgaaggcaagtgataatggcaagcgattaattcggaaaaaacaatccttcgatacagctatttatggtggttatacgggaaaaacgctggcttacatggctatcgtgaaagtatcgactaaaaaggatgtccagtaccaagttgtaggtgtacctacaactatggtgacacaaattgagcagttggaacaacaaggaatgacaaacaagcaagcggtgacgaaagtaattgaaccgctcattgctgccaacaacaagaagatgctgacgtatgaagtgttattgccgaaggtacggtttgaacaggtggttcgagatagaattaaaggtcaaacgcaccgcttcgcacttggtactgatacgtattatcacaacattcaagagctgtatttaccattaactttacagcgcgcatttttaggtaagcagaatgagtctgaagtgcaattaaatcagaatttactgactgtttttgacgcaacgcttgcccaggttaaccgatactttccactttacgagatgaacaagttcaagaagatacttaattctgctcgtgatcagattgagctgctggaagcgaaaaatcaatttgttaagaataagctggttttagggaagcaaggaattttgaccaatatgtttattggcttacatgcgaatgcctcgtatggtgatttaaaggtgctaggtgtgaaaatagattttggtaagttacaggttcctggtggcattaagttaacgggtgacgctgaaattatatatcaatcaccaactggtttgttcgagcgaaaaattgcattaaaagatttatag

SEQ ID NO: 344 - DNA, 4173 bp, Lactobacillus psittaci DSM 15354
atgaaagaagtaaaagactatattattggtctcgatatcgggacaaattcatgtgggtacgttgtaacagataaacaaaataatattttaaagcttaaaggtaaaactgctattggagcacgcctttttaaagaaggcgaagctgcagctgatagacgtgcctttagaactactagaagaagattggcaagacgtcgctggagactaggcttacttgaagaaatctttgatgaggaaatggccaaagttgattcaagtttctttagaagattaaaagagtcagattattctcctaaagatagccgtaaacaatttaattcaattgtttttgaaagtagtgaagcagataaggatttttacgataaatatccaactatttatcacttacgtaatgctttgatgcatgatgatcaaaaacatgatttacgagaaattttcttagcagttcatcatattgttaaatatcgtgggaactttttacgagaagattctgttaaggcttttaaagcagctaaattcactttacaaggtgaagatggaataggtccagttgataagttaaatgatttgttaaaagaaatttatattgaagctgctcctgaacttgcaaccgacaatctatctaagattgaagagattatcaaagataagaagttatacaagcaagataagttaaaacaagttgcaactttattaactaaagaagcagatacaaaggacaaagcaaagcttaataaagatgttgctaagcaagtagccaatgcctttatgggctacatgattatatttgatactatttttaacttaagtgatgtagatagcaaagattataaagttaaatttagtgatgcaaatattgatgaaaaattagatactctaactagtttattgactgataagcaaactgaatttgttttagaattacaaaatatctacaataccatcgtcttaaatgaaattgttccggatggtaaaagtttgtctgaatcaatggtcaagaaatatgatgaccataaggaagacttgaagttatttaaagcttatcttaactcattaactgatgttaagaaggtaaaagaacttaaagctgcatatgtattatatgtgaataatcgtaaagctaatttattagcagctaagaagttattaggcaaaaaagctgataatatgaataacttcgaaattttcagtaaatttgttgctgataatttagatgattcagaattagcaaacaaaattagagctagacttgatttaggtgaatttttaccaaagcaaagaactaatcaaaatggggtaattccataccaattgcatcaagttgaattaactcaaatccttgaaaaacaaggtaaatattatccattcttgatagcacctaaccctgttgaaagtcatagaaataatgcaccttataggattagtgaacttgtatcattccgtgtgccttattatgttggaccattaattgatccaaataatgctgaatctgaacaagataaggcaaatagttcctttgcttggatggtacgacaaaagcaaggtcaaattacgccttggaactttgaagaaatggttgatacaactgaatcagctaataagtttattaagcgaatgacaaccaaggatacttacttattgggtgaagatgtattgccagcttcaagtttgatttatcaaaaattcgttatcttaaatgaattaaataatattaaggttaatgggattaagttaacgtctgaagagaaacaccaaatttttgatgaactctttaaggtacaaaaatctgttagcttaaagaacttggttaacttcttgactgctcatggttgtgttgctcctaatgtaactggcttgtctgatggaactaagtttaatagtagctattcaacttatattgactatcgtaagatttttggtgctgaaattgataataaagataagcaagcagactttgaaaagatgattgaatggtcaacggtgtttgaagaccggaagattttcaagcgaaagttagaagaaattacttggctaacacctgaccaaattaaacaagtaagtagtaagcgttactcaggatggggaaggttatcaaagaagttattaactcaaattacagatgaaaatggagttaatatcttgcaaagactctggaatgaatctgaaaacttgatgcaaatattatctgatcctgtaattaaagaaaagattgtagctgctaatagttcatttaccaaagctactgacatggaggatatcttggcagaagcatatacttcacctcaaaataaaaaagccattcgccaggtaatgcgagtggttgatgatatcattgctgcagctcatggtaagaaacctagtcaaattgcaatcgaatttgctcgtgaagaccaagataatccccaaatgactaagtcacgtaaggcacaacttgaccaaatttatgccaaaattagtgatgagttcttggataatgctgttaaaaatgaactaaagaatatgaaagataataagcctctggctaaggacaaagtattcttatacttcaaacagatgggtagggatgcttatactggtgaaaaattatctttagataacttgcaagattatgatatcgaccatatctatccgcaatcctttattaaggatgactcatttgataacagagtacttgttcaaagagctgttaataatggtaagtcagataatgtaccagtactcttatttggtaataagcaagctgcagatttaggcatgactattcgccaaatgtggaagaagtggctagaactaggacttattagtaaacgtaagtttaataacttaattactgatccagaaaagatttctagttatatggcttctggatttgtaaatcgtcaacttgttgaaactagtcaagttattaagttagttgcaaatatcttacaagctaagttacctgatactgaaattattgaagtaaaggctagctacaattcaatcttacgtaaggaatttaacttatataagagtcgtgaagttaatgactaccaccatgcaattgatgcttacttaactacaattgtcggtaattacttatatcaagtctatccaaaacttagaccatactttgtatatggacaatttaagaagtttggtaaggctgaaagtaaagaagatgatccagttaagaaaattaagcaattcaactttatttatcaactactctggggcaaagatgacgcaatctgcattagccatactgatcaacaagtatttagtagaagcgatattattaacaaattaactacagcatataatttcaagtatatgaatgtatcacaagaagtttataccaatagtaataatgtgtttaagcagactgtcttcccaattattgaacgcgatactgctaagagtagaagcttaattcctaagaagcttgatcgaccaactgatatttatggtggatatagcaataataatgatgcttacctagctttagttaaagtagataagaagaaaggttcagaataccgtgttgttggtattcctatgagagctgctgcgatgcttaaagcttcaaagaattatgatgaagacttacgcaaagttattgaaccaatggtaatgcttgataagaatggtaaagctaagcgcggaattgaaggattcagagttttagttggtaagatgccgtttaagcaagctgtgcttgatggtgataagaagtttatgctaacaggaactaacgatatgccaaaccttaaacaattagtactgtcacagcaaaatatgaaatatatacttgattatattgatgatattgattgtagaaaacataaatttggtaataaaactcaagatggaaataaatgtttactagaagtatttgatgaaattatacagattgttgataagcattttgaactttttgataatagaagctttagagaaaaattacgtaatagtagagtaaattttatcaacctagcattatctaaaaaagctgaagcgttgttggcaatacttaatggattacatgcgaattcaatgagaacaacaattaaagaattaaaaatttcagatttaggaagaattcaatcgtctgtaatttctccagaagcacaacttatctaccaatcaccaactggattatttgaaagacgagttaaggtaaaagacttataa

SEQ ID NO: 345 - DNA, 4110 bp, Lactobacillus rennini DSM 20253
atggataagccctataatatcggccttgatatcggtagtcattcaattggctggaccgtggtcgatgataacagtaaactggttagaattaaaggtaaattaggttatggcgtgcgcctctttgatgaaggcaaaacagccgaagaaagacgccaattcagaacaacacggcgccgtttaaaacggcgtaaatggcgtttaagattactgcgtgaaatttttgaacctcatatagcaccactggacgaaacatttttccttcgccagaaacaatctaatctagttcccacccaaaaaaagctaccgcaactaagtttatttaacgatcggtcagatgctgaattttaccacaagtatcctaccatttatcatttaagaaacgctttaatgaccgaaaagcggcaatttgatttacgcgaaatttatctggcaatccaccacattgtgaaataccgcggtcattttctaaatgcggcccctgcggcatcttttaaaagtggcaaatttgatttagaaaataagtttgatcagcttaatttgctttttgcgagcgcttatagtgatttagatttcactttaaggactgacaacgttgatcaagttaaagcaatcttactcaacgaagatctcagtgccagtacacggcagcgccaagcattaccactgatttatcaaacatcagctgatcaaaaagcagcaaaaaagctaactaaatcacttgccactgaattattaaaagccattttaggtttaaaagctaaatttgacgtcttaacaggaattgagaccgatgacactaaagcttggcgtttgaccttcaacgctgaagattttgacgataaattaaacgagttaaacgtcaccgacaatgaagcagcaacgcaaatcatcgaaattttacgcgaactttattccagcattttattagctgccattgtgccggaaaattacacgttatcccaagcaatgatggcgaaatacaacgcacacaaacagcacttatcattattgcgacaggttaaaacaaccttgccagcaaaaaagcaaaaagagttgcaagcagcctatgatgactacattgaccagcaccttcccctagataaattctacgcaaaattaactaaagttttaccaaaagaaaaagacactgataatccgcaaattattcaaatattgaatttgattgacttggatcaatttctaccaaaacaacggactaaagacaacggtgcaattcctcatcaattgcaccagcaagaactcgatcaaatcattgacaatcaaaaagcctactatccttggttagcccaattaaatccaaatgaaaaacgccaaaagatagccaagtataaattagatgaattggttgcattcagagtcccttattacgttggccccttaattgaagccaaaacgcaacaaaaaacttccggtgccaactttgcttggatgatccgcaaagaacctggtaccactacccccattaccccttggaactttgatgaaaaagtgaaccgacaagcttcagccaatgaatttatcaaacggatgaccaccacggatacttatctgctaggtgaagatgttttacctaaacatagtctactatatcaacggtttgaagttttaaacgaacttaatggcattaaaatcgatcaaaaacgcgtgactgtacggcaaaaacaagcgattttcaatgatttatttttaaagcaacctaacgttacggttaaaaaattgcagcaatatttacaagctaaaggcgaatacgccagtgcaccaatcatcaccggtttatctgatcctaaaaaattcaacagccaattaagtacttaccatgagtacaaaaaaatttttggcggattaattgacgatcctgataaacaagctgactttgaaaaatgcattgaatggtccaccatttttgaagacagtcaaatccttaaagataaactaaaagaaattaactggctaacccctgaacaacggcacaaagttgccaataaacgttatcaaggctggggtcgactatctaaaaaattattaacacaattggtcgattacaatggtcagcggattatcgatattctttggaatacaactgataattttatgcaaattgtccactcagaggcgtttgataaagcaattatcaaagaaaatcaagctttattgacgcaatacaatccgcaagctgtaattgatgatctgtacacatcaccgcaaaacaaaaaagccttgcgccagattttattagtggttaacgatattcaaaaagcactaaaaggccaagcgccaagtcggattttaattgaatttgcccgagaaggtcaggaaaatccacgcctgtcaacgcaacggaaacaacaagttgaaaacgcgtataaagaagcaagtgatgccttgctcagcagtgcagaagtcagacaagaactcaagggcttagacaataaagctctcgcgaacacccggctcttcctttactttatgcaaggcggccgtgatatttacacaggcaagagcctaaatatcgatgatttatccaaatatgatatcgaccacattttgccgcaagcattcattaaagacaattccttagataaccgcgtgctagtttctgctaaaatgaaccggagtaaatctgatcaagtcccattaaacgactttgcggagattcgctatgggaaacaaatgcggcaacaatgggaaaaaatgctacgggcaggcttaattacgcggaaaaaataccataatttaacactaaatcctgaaagcattaataaatatactgctaaaggtttcatcaaccggcaattagttgaaaccagacaggtgactaaattagccacaaaccttttagtagatcagtatgctgaagacgatgtccaactaattaccgtcaaaagtaatttaacccaccaaatgcgggaagaatttgactttcctaaaaaccggaacgtcaataaccatcaccatgccttcgacgcttacttaactgcttttgtcggactttatttgctaaaacgttatccaaaattagccccttactttgtttatggtgactaccaaaaaggtgccagtcaaaattcaaagtggcgcaattttaactttttaggcaacttacaccgagagaaagtggttgataaaaataccggtgaaattatctggcaacgtgatgctgggttaggtgaactaaatcggatttataactttaaaaagattttggtgacccgcgcactacgcgttaaccgcggtccaatgtttaaacaaaccatctataaggcagaggaagataagtccagcggtcgtggcagtaaacaactaatcccaaccaagaaaaaccggcccactgagttatatggtggctacacgaacaaagaaactgcctacctctgtttagttaaagaaccacacaaaaaaggcgacatttatcgaatttgtagcgttttaaatatgtggctcacagaactagatcggattgctgacccaatcgctaaagcacaaaaattaacagaattattgaccccccaattcacaactaccaaaaagaagcaaggacagaaaattccagtcgttaaaccgtttaaggttgtcattcctaaaattttaattaatcaacgcttctttagtcgtggtcaagaattaaccgttgcttctcccatgtatatgcataatgagcaagaactctttctcaataaaaaaacaattaaattattaaacggtcaattagctaaaaacgaggctcacgagttagcacctaaaatttatcaacaaattttagatcaagtaaatgattattttccactttatgatatgtataaattccgtgacacccttaacgcaagtaaagaaatttttgttaatttaccttggcaagaccaacggcaggacaaaaaaattagccaatctggtcagaaatctatcttaaataaaattctaattggattacatgctaatgctgctcgaattaaattaactgaattaaatttcaaaagtgatttcggtctcttatcacaaagatctggtattgccttctcacctgatgatcaaattatttatcaatcccctactggtttattcgaaagaagggttacgttaaaagatttataa

SEQ ID NO: 346 - DNA, 4086 bp, Lactobacillus rhamnosus GG
atgacaaaattgaaccagccatatgggattgggcttgacattggttccaattcgattggctttgcggttgtggatgcgaatagtcatctcttgcggctgaaaggagaaacagccatcggtgcacggctatttagagaggggcaatcagctgctgaacggcgggaaagtcggacgactcggcggcgtttgagtcgaactcggtggcgcttaagctttttacgcgatttctttgccccgcacattacaaaaattgacccggatttcttcttgcggcaaaagtattccgaaatttcgcccaaagacaaggacaggtttaagtatgaaaagcgtctgtttaatgatcgaacggatgctgaattttacgaggactatccgagtatgtatcacttgcgtctgcatttgatgacgcatacgcataaagccgatccgcgtgagattttcttggcaatccatcatattttgaaaagtcgcgggcattttttgacgcccggtgctgctaaagactttaatacggataaagtcgatttagaagatatttttcctgccttgacagaggcatatgcgcaagtttatcccgatcttgagttaacttttgatttggcaaaggctgatgacttcaaggcaaaattgctagatgaacaagcgacgccgagcgatacccagaaggccttggtgaacttgttattaagcagtgatggtgagaaagaaatcgtcaagaaacgcaaacaagtgctgacagagtttgccaaagcgatcacagggctaaaaaccaagttcaatcttgctttaggtacagaagtagatgaagctgatgcgtcaaattggcaattctcgatggggcagctggacgacaagtggagtaacatcgaaacttccatgaccgatcaaggaacggaaatatttgaacaaattcaagaactttatcgagcacgattgctaaatggcattgtgccagcggggatgagcttatcccaggcaaaagttgctgactatgggcaacataaagaagatcttgagctgtttaaaacctacctcaagaaactaaatgatcacgaattagctaaaacaattcgaggtctttatgatcgatatattaatggcgatgatgctaagccttttttgagggaagactttgttaaagccttaaccaaagaagtaaccgcacacccaaatgaagtgtcggagcagctgttgaatcgaatgggacaggcaaacttcatgctcaaacaacgaactaaggccaatggtgcgattcctgtccaactgcaacaacgtgaactagaccagattattgctaatcaatccaaatactacgactggcttgccaaaccgaatccggtagagaagcatcgcgctagcaaaccttatcagctagatgaactgttaactttccgaatcccttactatgtaggaccactgatcacgccaaaagaacaggccgagtcaagagaaaatgtctttgcatggatgatccgtaaagatccttcaggcaatattaccccttacaattttgatgaaaaagtcgactgtccagcttcggcaaacatgtttatccaacgcatgaaaaacaccgatacttatttgattggcgaagatgtcttacctaaacgaagcctgttatatcaaaagtatgaagttttgaatgagttaaacaacgtcagcattgatggtaggaggcttggcgcagatcaaaaacaacgcttgatccgcgaagtgttcgagcgacatagcagcgtgaccattaaacaagtcgccgaaaatctagttgctcatggagattttgccaaacgcccagagattcgtgggctggcagatgagaaacgcttcttaagttcgctttcaacctatcatcaattgaaaaagatcttacatgaggcaattgatgatccgaccaaagagcatgatatcgaaaatattattacgtggtcgacagtttttgaagatgccgcaattttcaagaccgagctggctaaaattagttggttggattcagatacaatcaaggcattaagcaacatccgttatcgtggctggggtcagttctcgcgcaagcttttagatgggttgaaactaggcaatggccacaccgtaattcaggaattaatgctttcgaatcataacttaatgcaaattttgaccgatgaaacgttgaaaacaacgatggcggaattaaatcaagacaaactgaaggcagacgacattgaagatgtcattaatgatgcatatacttcgccaagcaataaaaaagctttgcgtcaagtgttacgggttgttgaagacatcaagcatgcagcaaacggtcaagatccaagttggctttatattgaaacggcagacggaccaggcactgccggtaaacgcacccagtcacggcaaaagcaaattcaaacagtttacgctaatgctgcccaagagctgattgatagtgctgttcgtggtgaattggaggataaaattgctgacaaggccagctttaccgatcggctagttctttacttcatgcaaggcgggcgggatatttataccggcgcaccgctgaatatcgatcaactcagccattatgacatcgatcacatactgccacaatcgttgatcaaggatgactctttagataaccgtgtgctcgttaacgccaccattaaccgcgaaaagaacaatgtatttgcttcaactttgtttgcaagcaagatggcagcaacttggcgtaagtggcacgaagccggtctaatcagtgggcgtaaactcagaaacttgatgctgcgtcctgatgagatcgataagtttgcgcacggatttgtcgcgcgtcaattggttgagacacgtcagatcattaaattaaccgaacagattgccgcggcgcaatatcccaacaccaagatcatcgcggtcaaagctggcttatcacatcaactgcgcgaagaactagactttccaaagaatcgtgatgtgaaccactaccaccacgcatttgatgccttcttagcagcgcggatcggcacgtatctgcttaagcggtatccgaaattggcgccatttttcacgtatggcgaatttgcaaaggtcgatgttaagaagttccgcgaattcaacttcattggtgcactaacacatgctaagaagaatattgtcgctaaagataccggcgagattgtttgggataaagaacgtgatatccaagagttggatcggatatataacttcaagaggatgttgataacgcacgaggtttactttgaaacagctgatttgttcaagcagacaatttatgctgccaaggattcgaaagaacgtggcggaagtaagcagctgattcctaagaagcagggttatccgactcaggtttatgggggttatacacgggaaaatacggcttatttggcggtggttaaaactgttgaaaagaaagcagatgtctatagagttgtcagaattgcaacttctcaagtagcggcattgaaagaagctagagcgcaatcgactgtcaaagaacgagaattattaaagaagtttttgacaacaaaattcacaaaaatcgggaagaacggtaaaaaagcaataacgccatttgatatcgttattccacgagtaccacgcgaacaactctttcataataaacgttatggctttttcatggttaattccgatacgctgatgcataactatcaggaactgtggatgtcacgctccgatcagcaaattttgtcaaaacttgtaaagtctgcgaaaactgtggaaaatggccaagtcggcaggctgtttgaaaatatagtggaacagattaataagtattttcctctgtatgatattaatcaattccgaaaaaagcttgatcaaagcaaagatatattttcaaaattaccattggaaggaaatggtacaacctcagggaagagagaaaccattcagaatattctaactggagcaggaactggtgcaaagaatggtgacttgaagaacttgggcataaaaacaccttttggttttttgcaagttccaagtggtattgtgctggatgacgacaccacattgatttatcaatctccaacaggaatgcttaacagaattgttcgattaagcgaactataa

SEQ ID NO: 347 - DNA, 4137 bp, Lactobacillus rossiae DSM 15814
atgaaaacgtttgcggaggaatacgtgatggataaatcaaaaccatatggaattggcctagatattggtacaaattctgtcgggttcgtggcgactgatgctgaggggcaccttatccgattgaaaggaaagacggttattggagcgtacctgtttaatgctggaatatcggcagcggaaagacgggggtttcggacgacaagacgtcgattatcgcgggttaaatggcgcctaggacttcttagagaaatatttgagactcattttcaggaaagtatgggagaaaatgaggataatgatttctttttacgtttcaaatactcgaatatttcacctaaagacccacaattttcgacggctaagggtttatttaatgatcgaacggataaggaattttatgatcagtatccgactatttatcatttgcgtcgggctttgatgactgaagaccatcagtttgatattcgggaaatatacatcgcaatgcatcacattgtgaaatatcgtggtcattttttaaaagaaggacgcgccaaagactttaaagttggggatttaagactgctggataatttcaaaatgatgaatgaacaaattgaagaaattaatcctttgtggcagttgaaattaccaactgatgacgcctctattaagtcgataaccgctattttactagacaatactcagagccaaaatgatcgtcaaaaagcagtgacgaaagtaattctggcaacacttgttaaggcgagtgacaaagacattaacgctgcacgtaaacggtttgttggcgaattgagtaaggctatggttggccttaaaacaaaactttgggttcttgcagatgtttcgcagaatggtgattgggaaattaagtatgaaaactacgctgactttgcggaaacgatcggttccggtgaaagtgacaccattcaaagtctttttaacgagattaatgatctatatggggttattacgttggctggcattattcccaaagaagctgagtcattttctgacggaatggtccgcaagtatgaacatcatcgtaaaaatctagaactgttaaaagtttattgtgcggaacaatcagatggtaaacggggacgacagattcgtcagacttatgataaatatattgatggggtagatagcaaacagtttacgcaggaagacttttataaggcattaagcaagttcactgcgaaggatgaagcgactagtgaaaatgccaaattaattgctcaggaaattgcagttggaactttcatgcctaagctgcgaacaaaggctaatggcaccattccacatcagttgcaccaaaaagaattggatgcaattattgaaaatcaaaaaaagtattacccatggcttggtgaagtcaatcccgttgagagtcatcgtcgcgcattgccatacaaattggatgaattagtcagttttaggattccatattatgttggaccaatggttacgccaacaaagggagatccagaaaaaagtaaatttgcctggatggttcgaaaggaaccgggtaccattacgccatggaatttcgatcaaaaagtagaccgatcggcgtctggtgaagcgtttattcaacgaatgaaaacgactgatacatttttaattggcgaagatgtattgccacaacaaagtctgctgtatcagaaatttgaagtactaaatgaattaaacaaaattatgataaacggtaagccaatttgcagagaacagaaacaacggcttttcaaacaactgtttatgcaatataagactgtgacagtgaagaaagttcaacaaaatttaattgcgaatggtgaagagtctgaaaatgtgccaattactggcttgtcagatcctttacggtttaatagttcattcagcacttatatcgattacaaagatattttgggtacagctgctgttaacgataatgcaaagcaaagcgatattgagcagataattgcatggtccacaatttttgaagatgcagccattttccgagagaagttaaatgatattacttggcttaatgacgatcaacgcaataagctcagtcataaacgttatcgcggttggggtcgtcattctcgcaaattgttagctggtcttcgtgacggagaaggccagactatcatcgaacggctatggaacacaaatgacaacttcatgcagattcaaaacgatagtgaaatagcgcgtcaaattaccgaagcaaactcaagcaagatggcaaccgctgagggaacagacgaaattatcgatggcttctacacttcacccgaaaacaaaaaggccctgcgtgaagtaatgaaagttgtgaaggatattcaacgtgcgcatcatggtcaggcacctgcttgggtttatattgaaagtccgcgagagacaccaagacccggtcagcggacagttagtcgagaacaacagttaacagatttgtatgagggtgcagcaaaagaaatcgttgatgatgccgttttaaatgaactaaaggacaaggttaaatccaaggaaaactttacggataaattagttttgtatttcttgcaaaatggacatgatatttatgcgaatgacagtatcaacattgataaccttaatgcatatgatatcgatcatgttttaccgcaaagtttgataaaagatgatagcctagacaatcgggttctcacaacacatgaaagaaatcttaaaaaatctaatcggtttgctacagaactgtttgccgatcaaaggaaaaaatgggaaaaatggcatcgattaggattgatttcgtcacgtaaattaaaacatttaactatgcagcccaattcagtagaaaaatttgcacatggatttattgcacgtcaactcactgaaacgaggcaaataattcatttaacggcgaatgtactttcaaatttatatcaagaaaatgacactaaaatcgttatgattaaggcgggattaaactcggagtttaggcgtacatttgattttccaaagaatcgtagtgtaaatgattaccaccatgcctttgatgcatttttaacggccaaaattggacgttacttattagcgagatatccaaaattagaacccttttttgtttatggaaacttcgttaagaatcctaaagcaatgaagcgattgagtagttttgatttcattgctcagttagctgctaaaactgatgatactagtcatatagatcaacgcagtttaaaacaagttcccgttgttaatgaagaaacaggggaaattgtttgggataaggatattgagcttgctgaactggacaagacgtataactacaaaactatgttagtgaaacgtgctcagactgaaaataatgctcaaatgttcaaacaaacagtttttaaggctcgtgacaatcaaaataaaacgctaattcctgtcaaaaatggattatctactgacgtttatggtggtcattcacaacaggcgatttcttacttatgtatcgtttgggttggacaaaagaaaaaatatcgcgttttgggaattagtaccgcccatgcaggcatattgaacaatttcgaaaaaaactacggccggtttgaagcgaaaaagaaactacaagaaattgtctccaatacactagataatgcggacagaaacgattttaagatagttgctcctaaagttttgtttgaacaagtggttgaggacgataacatgaagtttgggttgggtagtgctagtgactatagaaatgttcaacagttgtttttatcccggaaaaatcagttgctattggctaatatgatgactgaccaaatacacgaccaagatttagtccacctttttgacgaaatagttggtcaaatgaatgcgcattttcccatttttgatcgcggaggctatcgaagttcattgacccaatctcgtgataaatttttgaaattaccttttaaaaagaatgaggatttgatcacgaaacaagaggttattcgaagaattttagatggattacatgctaatgcaaatcgtaaagatcttaaaatcattggtagtaaaggtgattttgggagattgggaacaaagaaaatctacttatcgaaagatgcgaagcttatttacacctcaccaacatgtctttttactcgtactgttccactcagttctttgtaa

SEQ ID NO: 348 - DNA, 4128 bp, Lactobacillus ruminis ATCC 25644
atgagaaaaaaccaagaaccgtacaacataggcttggatattggcactagctccattggatggtcaataatgaatgataattttgatctgatgagagtcaagggcaaaaaaggtatcggggtacgattgtataacgaaggacagtctgctgctgaaagaagaatgcatcggactgccagacgtcgatatggacgaagaaaatggcgtctaaggttgttggaagatttttttgatgaacatatggccgaagtagacgacactttttttgcaagacttaaagattccaacatatctccaaaggatgataaaaaatatcggaaatcattgctttttccaaagtcaaaaggcgtcacgtaccaagatgatggcgagttttacaaaaaatatccgacaatgtaccatctgcgctatgcactgatgactgagcatcgaaaatttgatcttagggaaatatacttggcgtttcaccatatggtcaaatatcgcggtaatttcttatatgataccagcgttgattcttttgaagcaaagaaccttgatattaagggaaaatttgatgagattaatgatttgctctcgagttatacggatttttacgttgataacagcaatgcagcgctagttgaatcaattttgttggaaaaaaatacgaccagaaaagataagtcaaaaaagattgccaaacttcttcacgtagaagacaaagaaaagggcaagaataaaaaggccaaagatttggcaactcaaatctctaatgctgttttgggtttgaaatgcaattttcatctgatttttgaattgcaacagaagtattcttttgatttgtgttcggaaaaaacggaagaaaatatcgcaaaattgtcagaagtgcttgatgaaaatcaaaagatgttactgatgattttgaaagaggttcaagatcaagtaatgctgaatgcattcgttccgtcgggaatgagtttatctgaggcaatgatgcaaaagtatgatgactatggtgagcagttgaaaatataccacgagctcgaacatagcgtttctgatgattcagcagccaaattacgtggtgcgtatcgtgattataatgacaatataataaaaagaattgacggcgataataaaaaggacactttttacaagagagtcaaaaacatattaactaaaatatcaaaagaatacgttgatcaagatgtgttagagtcttgcggcaagttaaagaaactcatagacgaaaacaagctttttatcagacagcgaacggcagcaaatggtgttttgccgcatcaactgcatcaaatagagatgcgtaaaattattgataatcaaaaagagtattacccttggcttgctgagccgaacccgaacgaaaagagaagggtctactcgaagtacaaagttgaggagttgattgctttcagaattccgtattatgttggaccgttagttgatcccaacaacgctgacaaaaacaaagaagcacgtttttcttggatggttcgcaaaaaggacggcgaaattactccatggaatttctatgataaagttgactgggcagagtccgctaacaattttatagaacggatgaagagcaaggatacttatcttcttggtgaagatgttgttccaaaagaaagcatgctttatcaaaaatatgaagttctgaatgagctgaataatttaagaattaatgacagtgggttaagtgattcgtttgaagatgtcaagttaaaacaagcaatctataatgatttatttaaaaaacaaaaaattgttaaaatcacagatttacaaaattatcttgttcaaaatcataaatatttggtcaaaccaaaaatcagcggattggccgatgaaaatcgtttcttatcatctttgagcacatacagcgatttaaaaacaatttttggtgacaaagttgatgacaggacatattttaacgattttgaaaaaatggtggaatactctaccgtatttgaagacggccatgattataatcaaaagcttgatgaatatacctggcttactaaagaagaaaagtacaaaattggaaagaaacgttatcgtggttggggaaagttgtccaaaaagttgttaacaggtttgcgcgacaaaaataatcatacgataatggataatctgtgggaaaccaatcgaaactttatgcagattcaaacagcagatgaattttcaaaacaaattgctgaagaaaacgaaaggcatttgaaaggaagcgttagtgacgcaataaatgacatgtatacgtctccggccaataaaaaagcaatcaggcaagttttaagggtggtcgacgatatacaaaaagcaatgggatacgcaccatcttcaatttcattggaatttgctcgtgaagacgggccgtccgtaaggacagtgtcgagagcgaacagaatgaagtccatatatgaaaagtacgcttctgaagttagcgaagaagtgatgaaggatttggacggcgtgatcaaggataagaaaggcttgaatgacaggttatatctttattttgaacaacaaggaaaagatatgtattctggtcatccgcttgatttcgacaaagtaatcagtggtcaagaatatgatattgatcatattttgcctcaagctgtcattaaggatgattcgcttgataatcgtgttttgacgactaaagcactcaataacgatgttaagtcgaagggtgttccgtgcagaatgtttaatgggatgcatagtttttggaagaatttgtatgacaaagggtttatttctcgtaggaaattcaataatttgacaactaatcctgaaaatattgataagtataagatgaaggggtttgtaaatcgccaactagttgaaacgcggcaaattatcaagcttgttgccaacgttttaaacgataaatatcaaaatgacgatgttgacattattgaggtaagggctgaacttacgcatgatgtcagaaagcatttcaaattctataaaaacaggaatgtaaatgattatcatcatgctttcgacgcttatttgacgagctttattggtcattaccttttcaaaaagtatccaaatctcaggccgttatttgattataatgattttatgaaggtgtcggataacgtatttaagcaacttcgcggaaataatttcttaggtgagtttttgaataaaactggtgatatcatcagtactgatggaaatttcgttctcaataaagaagaaatgattaataagctgaataaggcttatgcgtttaagaagatactggttacaaaagaagtgggacagcgtacgggagctatgtttaatgaaactagatacccggcgcctaacagtagaaaagctgctctcaaatatagaagaatgccaaagcctgactcattaataagcgtaaaagattacaaaaatacagatatatatggtggttatagcggtaaaaatgatgcatatatggttattgtcgatatgggcaagcaatatatggttgttggtgttcctgttcgatatacggaaaaacttgataaactgcgtatcaagcattctgaattgtatagggatgaattacgcaaagttctttcgagggacaagacgctattggattctaagggaaatgttaagcgatttgatatcgttctagatagagttctttatggtcagcttattgaagatggaaatgagttatttactttgggaagctcaaagtataagcgtaatttcagacaattgtttttagataaacaatgtatagaaattcttgattcgagtgcaactccgcaacctactgatgaggagcttatatgggtatatgatcaaatattggataaggttgataaatactttgaactctatgatattaatagacaaagggaaacgttgagaaagggaagagcggcattttgctcattgcctaatattagtatgaaaaaggatgatgtaacaaaaaagaaaatattaaatgaaatattagttgcattgcatgcaaatgaaagtgaatctaactgcgaaaaaattggaaagaaggtttttgggagattgcaagtcccaggcggaattaaattatccaaggaagccaaacttatctatcaatcaccaacaggtctatttgaacgagtcgtatatttgaaagatctataa

SEQ ID NO: 349 - DNA, 4110 bp, Lactobacillus sakei carnosus DSM 15831
atggcgaaaacatataatatcggactagatattggtacaaattcaattgggtgggcagtcgttgatgaccagaaccacttaatgagtattaaaggaaagtacggttatggtgttcgattatatgatgaaggaaaaacagccgaagaacgtcggagttttcgaacaacacgtcgtagattaaaacggcgtaaatggcgattgagtttattaagagaaatttttgaaccacaaatcacgccgcttgataacacatttttcttacgtcagaaacaatcaagtctaagctcaaaggataatcgtaaattatatccagaaatgagtctttttaatgatcgaacggatactgatttttatacacaatatccaacaatttatcatctgagccgcgatttaatgactaagaataagcaatttgatattagagaaatttatttagcaatgtatcatattgtgaaatatcggggacattttttgaatgaatcaccggtatcatcatttaaaagtagtgaaattaaattagctgaaaattttgaaactttaaaccaaatatttaacgaacgatttaatgaatccatgttccaattagctgtaaatgattttgatgatttgaaagcattattgctaaatgaccaacaaagtgctagtaatcgacagaaaaaagcattgggaatgatttatgttccaaacgaaaacaaatcacttgagaagcaaaataaggcaattgccactgagttattaaaagcgattctaggcttaaaagcaaaatttaacgtcctaaccggaattgaagtcgatgacgcgaagccatggacattatcatttaactctgaaagtttcgatgaagatattgataaggcagcaaccaatattgatgatgacagccgggaaataatagcaatcttacagggcctttattcgggtatcttattagcaggtattatacctgaaaatcaatcattatcggaagcgatggtcgaaaaatatgaccagcatgctgctcatttaaagcaattaaagtcaatctacccactgttgagtatttctgataaaaaagcaattcaacaggcctacaattattatattgatgggcaagataatgctaaagcttacagcagagaagatttttatgcagcaactactaaagcattgaaatcatatcaggataacgaaacgattgctgaaattctaaagttaatcgaacttgaacaatttatgccaaagcaacgaacaaaagataatggtgcaatcccacatcagttgcaccaacaagagctagagcggattattgaaaaccaacaaaaatattatccttggttggcagaacttaatcctaacgaaagtcggcgtaaaattgctaagtataaattggatgagttagtggcatttagagtgccttattatgttgggccattgatcacgtctgaacagcaacaacaaagttcgaataaaaaatttgcgtggatgattcgaaaagcagagggtaagattacaccgtggaattttgatgaaaaagtggatcgacaagcatcggcaaatgaatttattaaacggatgacaaccactgacacctatttattggcagaagatgttttacctaaacaaagtttggtatatcaacgatttgaagtgctaaacgaattaaacggtattaagattgatgatgtaccgattacagttgaacaaaagcaacggatttttaacgatttgttcatgatgcaagcaagtgtttcggttaaaaatattcaagattatttggtttcgaagggttattttgctagtcggcctgaaattacgggattatctgatgaaaataaggttatcagtaggttgagtacgtaccatgatttgaaggcaatcttgggcggaattgttgatgaagccaacaaacaagctgatctagaaaaatgtgttgaatggtcaacaatttttgaagatggtaaaatttttgtcgaaaaattaaatgaaattgaatggttaacagatgaacagcggaaacgattatcttctaaacgttatcggggatggggccgtctttccaataaattattaaatcagattgttaatgaaaacggtcagagaataatggatttattgtgggatacgacagacaattttatgcggattgttcattcagaggaattcgataaattaattagtgctgctaaccaaacgttattatccaaaaatgatgttcaagatgtgattaatgatttatatacgtcacctcagaataaaaaggcattacgccaaattctattagtggtatctgatattcaaaaagcaatgaagaatcaagcgccaagtaaaattctaattgagtttgcccgtgaggatgaggcaaatccacgtttatctgttcagcggaaacggcaagtcgagcaagtttatcaaaatattagtaaggatatccttagtgattctgatgttaaggcggaattaaaggatttaactaacacagcattagcaaatacgcgattattcttgtactttatgcagggtggtcatgatatgtatactggagaaactttaaatattgatcgcttatcagaatatgatattgatcatattttaccgcaagccttcattaaagataattctttagataatcgggttttggtatctgcaaaaatgaatcggagcaaatctgatcaagtaccgttaaatgactatactgaagaacgatttggctcaaaaatgcgtgttcaatgggaacaaatgttacgagcaggattaataactaaacgaaaatatgataatttaacgttaaatcccgatcgaattagtaaatatgctatgaaggggtttatcaatcgacaattggttgaaacacgacaagtgattaagttagtaactaacttattaatggatcattatgaagatgatgaggtccagttgattacagttaaaagtggtttgatacatcaaatgcgtgagatgtttgattttcctaaaaatagaaatttaaataaccatcaccatgcatttgatgcttatttaacggcttttgtgggaatctatcttcttaaacgttaccctaaattaacgccattttttgtttatggaagctatcaaaagaataataccaatgataagtggcgtaattttaatttccttaacgatttaaaaaaggaagaagtaatagattcagattctcacgaggttatctggaataaagcgcaaggacttgttgagttggataaaatttatcaatttaagaaaatcttagtgacccgtgaagtccatgaaaatacaggtgcactatacaaccaaacgctgtattctgctaaagacgataaggctagcggtcaaggtggtaaacagttgattcctgccaagcaggaccggccaactgcattatacggtggttactcgggcaagacggttgcttatatgtgtattgtccggattaagtctaagaaagaagatacgtataaggtttgtggtgttaagacgagttgggtggcagaattggagagactatctgattctaatgaacaattagctagtcttaaggcaaaattgatgcctaaatttacgaagaataaaaaacaaaaaggaaaaacaattcaagttaccgaagattttgaaatcattgttcctagggtattaattaatcaacggttttatgataatggacaagaaataactctaggatcagcaacttataagcataatgaacaagaattaatgctaaataaaaaggcagttaaactattgaatggtcaattatcgttagttgaggccgaaacattagcaccgcaagtttatgatgagattttaaaacaagtgatgaaatacttcccactgtatgataccaatcaatttagaacaaagttgaagatgggtaaggaacaattcatcaaattaccgtggaagaataaatgggacggtaataaattgattcatgtgggccaacaaacagtattagatcgcattttaattggattgcatgcaaatgcagcggtgagtgacttaagtaccttaaaggtaacaacaccatttggtaaattacaacaaccatctggaatagcactttccctaaatacgaaaattatctatcaatctccaactggcttatttgaacgacgagttgctttaaggggtttataa

SEQ ID NO: 350 - DNA, 3450 bp, Lactobacillus salivarius UCC 118
atggaaagatatcacattggcctagatatagggacttcgtctataggatgggcagtaataggcgatgatttcaaaattaagagaaagaaaggaaagaatttaataggggttcgtttatttaaagaaggagataccgccgcagaacgtcgaggtttcagaactcaaagaagacgacttaacagaagaaaatggcgattgaaattattagaggaaatttttgatccgtacatggcagaggtagataaatatttttttgccagattaaaagaatcaaatctttccccaaaagacagtaataagaaatatttaggttcattattattcccagatatatctgattcaaatttctatgataagtatccaacaatttatcatttacgaagagatttaatggaaaaagataagaagtttgatttaagagaaatctatttagcaattcaccatattgtcaagtatcgtggcaattttttagaaaaagttcctgcaaaaaactataaaaatagtggagcatcaattggatttcttttagaagaggttaacgatttatacggtaacatcatcggtaatgaagacgttgccattcttgataatgataagtttgaagatgtagaaaagataatcttaaatgatgaaattagaaatattgataaacaaaaaaatgtaggaagactattagtaaaagataaaaaggaaaagaatatagttactgcattttctaaggctatttttggatataaatttaatcttgaagatttattgttgatagaaagtgatgaaaagaataaattaacatttaatgatgaaaatattgatgacatttttaatgaattatcacattccctaaatgataaccaaatggatttactaactaagactagggaaatctactttaagttcaaattaaatatgattgttccaactggatatacaatatctgaatccatgatagaaaagtacgagatgcacaaagctcatttaaaaatgtacaaggaatttatcaatactctaaatgcaaaagatagaaagatcttaaagaatgcttacagtgactatattaataatgaaaaagctaaagctgctaacgctcaggaaaatttctataaaactgtaaagaagactattaaagaaaatgattcagatacggctaaaaagattataggcttaattgatgaaggaaattttatgcctaagcaaagaaccggtgaaaatggtgtaatccctcatcagttacatcaaatagagttagatagaattattgaaaatcaagccaaatattatccatggttggcagaagaaaatcctgtagaaaagaatagaaaattcgctaaatataaattggatgagctagttacttttagagtgccatactatgttggaccactgatagataagacagagtctaataaaaatgaaaaagaaacaaaatttgcatggatggttcgaaaagcaaaaggaacaataactccatggaatttcgaaaatttggttgatagaacagaatcagctaatcgttttattaaacgcatgacttccaaagatacatatataattggtgaagatgtattgcctgcttctagtttgctatacgagaaatataaagtacttaatgaattgaataatattaaagtaaataaaaagaagttagatgttgaacagaaacagcatgtttatttagatttgtttacaactagaaagaatgtaacaaaagatgatctagcaacttccctaaattgtgatgtagaaagtattactggactaaccgataacaaaaagtttaattcttcactgtcaagttatattgatttaaaagcgatattaggaaatatagtagatgattacagtaaaaacgaagatttagaaaaaattattgaatattcaactatttttgaagatggtaatatctacaaagaaaaattaagtgaaatatcatggttgactgatgagcagattgaaaaattatcaaatattcatttcaaaggatggggaagattatcaaagaaattactaacacagattactaatgagaatggtgaaagaattattgatacattgtggaatacatctaataattttatacaagttataagtgatgaaagtattcaagcaaaattagctgaaattaacggtgagtatgcgaataaatataacttagaagatatattagatgaggcatatacatctccacagaacaaaaaagccattagacaagtaatgaaagttgttgaagatattgaaaaagcaatgaagtgtgagccaacatctatagctattgaatttactagggaaaaacgaaagagtaaattaacgaatactcgttataagaaaatatctgaaacttatgagaaaattacagatgaactaatctccgaatatgaattaggaaaattacaatcagaattagatagtaaagtcaataatatgagagatagatattatttatactttatgcagttaggtagagatatgtatactggtgagaaaatgaatattgatgaattgcaccaaaaatatgatattgatcacattcttccacaatcctttataaaagatgattcgcttaataacagagtgttaactagtaaaagcgtgaatattaaagaaaagtcagacaagacagctgcagatttgtatgcagcgaagatgggtgatttttggcgtaaactacgtaaacaaggtttaatgacggagcaaaaatataaaaatttattaactaggacagacagtataaacaaatatactaagcaaagtttcattaagcgtcaattagtagaaacaagtcaagtggtaaaattggctgctaatatattgcaagataaatatcgtaatacaaagattattgaaataagggcaagattaaatagtgatttaagaaaaaaatatgagctgataaaaaatcgagaagttaacgattatcatcatgctatagatggatatttaacaacctttgttggacaatatctgtataaagtatatcctaaattacgcagttattttgtatatgatgattttaagaagctagatagtaattacttgaaacatatggataagtttaactttatatggaaattagaagataaaaaagcagaagatgtctacgataaggtaaatgatgaattcgttttaaatgtgccagagatgaaagaatatatacgaaaaatttataattataaatatatgttagtttcaaaagaagtaactactaaaaatggtgcattttatgatcagacaaaatataatgctaagacgattaacttgattccaataaagaaagataaacctacaaacatttatgggggctacaaggggaaagtaagtagctacatgatgctagttaagattcaaaagaagaaagaagtaatatataaatttgtaggtgtaccaagactttggactgacgaattagatagattaattgatactgatgaaaagaaagcattattgaaaaaatag

SEQ ID NO: 351 - DNA, 3996 bp, Lactobacillus sanfranciscensis DSM 20451
atgaataaacaaccatataatattggactagatattggaacgagttcagttgggtggtcagccactgaactggataatcgtttattacatattaagggacacaacggaatcggagttcgtttatttaaagaaggagaatcggcagctgatcgtcgtggctttagaacaactagaagacgattagctcgtcgaaaatggcggcttcggttgttaaacgaaatttttgctactgaaattgcaaaagttgatccaagtttctttgccagattaaaacaatcaaacgtttcgcccaaagatccaaataaaacaatgtttgagaatatcttatttgatgacgaaaatttagatgatcaaaaatttcatcatgattacaaaacaatttatcatttgcggcaagcaattattaatcatccagaacaaaaatttgacattagattaatttacttagccatgcaccatattattaaatatcgtggtcattttttgaatcaagcaaatgtgcaagattttaaaggtggaaaaattgatttagaaaaatcttttaaagcgttgaatgacatctttgaaaatcaaggacgtgatttacggcttgtgactgataaggctaatcaatatgtaaaagtacttagtgataacgccaaaactagatctgatcggaaaaaagaattatcgaagttattgtatgttccaattgataaagatactgataagaatagtaagaaagttacgggagaaatcctcaaggctattttaggtaataaagctaaatttgatgtgatttttggcattgaggtggaaaatcctaaagaatgggtcttaactttcaatagtgatgattttgacgataaaattgaaggtttatcatcccaaatgacggatgaagattctgaaattcttttaattttgaaagaactttattttgctttgaacttatctgatattttaaataactcagttactgataaaaatgcaaaaactttatcagaagcgatgattaaccgttacgatgatcataaaaatcaattagcaatgttgaaaaaagtaattgatagttctgataagaaacatgcaaaggaattaaaagaagcttattcagcatatattgatggggaaaataataaaaagatttcttttgaagatttaaagaaacgaattcaaaagaacttagttgattcagaattatcacaaaaaattaatgatttattagatcatgattactttttacctaaacaacgttctaaagagaacggtgccatcccacatcaattacaacaacaagaattagatcaaatcattgaaagtcaaaaacaatactaccctttcttagcagaattaaacccgaacgaaaaacgaagtcgtcaagctaagtataaacttgatgagttagttgctttccgagttccttattacgttgggccgatggttgaagttaccgatagtaatcaagaaaataatggtaagtttgcttggatgattagaaaagaacaaggtgaaattaccccttggaattttgacgaaaaagttgatcggactgaaactgctaccaaattcattactagaatgactacgaccgatacttatttaattggtgaaccagtgcttcctaaaaatagtttgttataccaaaaatttgtagtcttaaatgaattaaacaatttaaaaatcaatcaagaaataattacgcctggacaaaagcaatatctttatgaacatgtaatgaagaaaaacaagcgggtgaccttgaaaaagattgcagatgccttagtaattaaaggtgactatccttacgctccagaagttaagggaacaactgaccaaaagaatttaaataacggattaacgacttatatcgatttagccaaaatttttggtaatgaattagatgatgttgatcgagaagcagactttgaaaaaatcatcgagtggtcaacgatttttgaggatcaacatatatttgccttaaaacttcaagagcttaaatggcttacggaaaaacaacgtaatcaagttgttaaacttcgataccaaggttggggtaaattatctaaagaattacttgctggtttagttgatgataatgggcaacgaattattgatcttttgtggagcgataatcaaaactttatgcaaatcgtaaaccaaaaatcatttaaagaatcaattgctgatcataatggtgctcacttagaagagaaaaatttaaaagatgttatcaatgatttatatacttcacctcaaaataaaaaagccattcgtcaggttattttagtggtcgatgacattattaatgcagttggttatgaaccagctaatattatgatggagtttgcccgtgaagattctaacgaccatcgcttaactaattctagaagtcgacaattagaaaatgtttataaggatattactaatagttggtttgacaatgatagtgttaaagatgaactagaggacaaaattaaaaataaagataagtttacagaccgcttgtatctatactttacacaaggcggaaaagatttatatactggtgaaccattaaatattgatgatttatctagttatgacattgatcacattttgcctcaatcatttattttagataattcgttagataatcgggtccttacttctcaaagaaataatcgggtttcaaaagaagatcaattgccaggtgaattattcggtactaagatgcacgcattttggaaacgattaaaagcagctcatttaattagcaataaaaaatactataatttaacgcttacacctaattcaattagtaaatttaataatcaaggacgttttattaatcgtcagctagttgaaacgagacaagtaattaaattagctgctgaaatacttcataatcgttattctgaagaaaaaggaactaacattgtgacaattaaagcaaatttaactcatcacatgcgggaaaaattcaatttctataagaaccgaaatgttaatgattatcatcatgcctttgatgcatatttaacggcttttgtgggaaactggctattacaacaatatcctaaattgaaaccttattttgtatacggtgattttgctaaaactgaaattaataatttgaagtcatttaacatgctttataaatttgaacaagctcaccaattgaatgaaaaagatgggaagattgctaaagatgcggatgccttattaggttatatgaaaaatgtctatcactttaagaagatgttggttactaagaaattggaaactaatcatggggctttatttaaacaaactttgtacccatcaccagctcatgatattaaaaaacggcaattaataaaaccaaaggataatcggccaacagatatatatggtggttatacacatgaagaaagaaaatatatgtctttagttaaagtgattgggaaaaaagataacgaatatagaatggcgaatgtaccacttttaaaaattaataagaataatgatattaaagaaattttaaaatcacaattttctaataagaaattcgaaattgttttacctaaagttttaaaaaatcaattatttagtgaaaatggtgcattatttgtgattggcagtaaaggatataaatataatgctaatcaacttgttttatctgatcttgatatgaaacttttaaatgatttaagtaacaataaatctattgatgaagttactatcaatcaattatttaaaaatattgttgatagtactaataaatatatgccattatatgaaattaaaaatttaaatgaagtagttgaaaaattcaataatctagaatttaatgataagaagaaaacgataactgatttcttactggcaactcatgctaatcctactatgagtaatttgaaaaatattggattgccatcttactttggtagatttacaagtggaaatgctggaattaaattaagtgaaaatgcaaatgtaatttaccaatcaccaactggattattttcacgaaaagttaaaatttctgatttttaa

SEQ ID NO: 352 - DNA, 4041 bp, Lactobacillus saniviri DSM 24301
atggttgaacattatgcgattgggtttgatattgggacaggctcgacaggatttgccggtgttgaccctaatggtaagcttgtgcgaatgcgcggcaagaatgtttacggggtttatcgcttcaagggtggcgaagcagctgcggatcgacgtggttttcggacgacacggcggcgaatcaagcggcgcaaatggcgcttgcggtttttaaagagtttttttgagccctacatagcaccaattgatccagaattctttttacggcagaagtattcagctgattcgccattggatccaaaggggatccgagcggataagggccttttgtcagacatgagtgatcaagagtttcatgcgaaatatccaacgatttatcacctgcgctaccagttgatgcacgagaagcgacaatttgatgtccgcgaaatttatctggcgatgcatcatatcatcaaatatcggggtcactttttaatcgaagatggcgcggacaactttgacgctaaacaaatcgatttctttgatcaattccaacgaatggctgcggtgacggcgggcttgcctgaattagaaactttggtcgtgccagatgagacacaatcagatgcatttaagcgcgtcttgtttgacgaatcacagaccaagtctgatcggcaaaaagtattggccagtcaactgctggatattcaagataatcagagtaaggcgattaaggactttattgcagcactaactaaggctgtggtgggcatgaaggctaacttagcgacattgacatcaacagctattgagagtactgacaagaatgactggaccaaaccgcttggccagctcgatgatttcttactcaagcatgaagaagatcttgatgaggatgggtatgcactgattgatgcggctaatcagatgtattcggctgctgtattagccgcgcttgttcctgaaggcatgggtttctctgaggcaatgatggcgcgttatgcgcaacataagaaacaattagcgttgtataaacaagttattgccagtttgcctgataagacacagcgccatgagctgaaggatgcttatgcggactatattgaacatgccgcacaaaatccgagagatgcattttataagcgtgtgaccaaggtactggaaggtgtggactcagcagacgcgcgcacagttatgaccgctatctcacacgatgagtttttattaaagcaacgcacattgagtaatggcaaaattccttatcagatgcagcagcatgaatttgatgccattattgagaatcaaaaagcttattatccatggctggccacgccaaatccagttgaggcggatgctaagcgcctgccgtactaccttgacgaactgattggctttagggtgccttattatgtggggccaatggtaacggaaaagcagtcacagtttgcctggatgattcgtaaagccgatggagaattgacaccatggaatttctttgacgtggtcgatcgggagaaaaccgctaatcgattcattcagcggatgcagacaacagataaatatatcctgggtgaagatgtcctgccgaagcatagtattttgtaccaacaatttgaggtgctcaatgagctgaataatattcgtgtagagaaacatccactgacaactgagcaaaaacaatttatctatcagcgattatttgttgatcaacagcgaaaaacaattaccaagaagaatcttcaagataccttagtggccatgggtgagtttgataaggcacctgatatcggcggtttggctaaggaagacgtgatgatgagcagtctcgcgacgtttgctgattacagcaagattttacccgaagcgattagtgaccccacacggcaaaatgatattgaagatatcattgcatggtcaactatttttgaagacacacagattttctttgataagttgaagacagtggactggttgacgacccagcaacgcaagcgcttggcaagtattcgctacaccggttggggcaaattatcgaagcgattactgcagcagattccaaccagcaagcacaccaacgtgatggcagcattatgggcaacgagcgataatttcatgcaaatcctgcaagatgaacaattccaagaaggtctgtatgatgccaatcgcttaccagaagagacacttacgccggatgaacaggttgaaaaaattctggatgaagcgtacctgtcacctgccgataagaagggcgcgcgtaaggttatcaaggtgatgaacgacattgttcgcgctaatcacggtgttttacccgaacaggtatttctggaatcagctgatgatccgcaaaaaaataagcggcgtagtgtcagccgcagcaagcaattggaagaaaagtacagacaagccgcacagagcttcatcgatgaagcggttaaggaagaactgaatgcacaaattgtaaacagtgcagaattcaatgaccgattggtactatacttcactcaaaatggacgcgatatgtatactggcaagcgattagacattgaaaacctgggtagttaccaaattgatcatattttgcctcagtctctggtaaaggatgactcactggataatcgcgcactgacagctagagatattaatgcggagatgagtaatcagttcgtttctgaacgtttcgggctagggccacgggctttttggcaacaattgaagaataacggtttgatcagtggccggaagttccgtaatttggttatgcaacgtgatgagattgataagtacgcgccgggattcattaatcggcaactagttgaaacgcgacagattattaagacggttgagcaaatcattcatcgcttgtggccagatattcagattgtgacgattaaggcaaatttgacgcatcaggtgcgctctgaattgggcttccccaaagttcgtgagttgaatgattatcatcacgcgtttgatgcattattggctgcccgtattggacagtacttgttggaacattatgctggcttaaaacccttcttcacttatggtgaattcaagcgcggagacaccaagaaatacgggacaacgaattttttgcggcggctaactaaagataataaggacaaaaaaggtgagttgctacctgaagtaagtgattggattgacagcatcgattccatttacaattataagaaaatacctgtggtttgggaaaacacaacgaacatgagtgccctctttgaccagacgatttatccccgacctgatcgtgatacgacaaagcgcaaattgattccgacgaagcttgataaaccgacagatatttatggcgggtattcaagcgctaagacagcctatatggcagtgatgcgggtacagactaaaaaaggtactgaatacccggttttcaatattcctgtctcaatcgcgtctcagctgaatcgtattactgatcagacgatgttaaagcagcaagtcaaacagttcattatcaacgctgaacaaagtgcaagtaaaaagaagttgtacgagagtggcgatgtgattttgtcacgggttgcattaggacaacgatttactgacaaaaattatggtgaagttttcttgatttcaaatatggaagtgcagaatcctcaatcgctttggttgggtcgcgctagtcaacaacgattaacgcgtgaaccagagggcaatgaaaagccagagacatcgctggccgatatttatcagcaaatcttgaaacaggtcgaccgatatttcttggcctttaatattcgccaacaacgccagaaattattgggcactttggaccagtttacgagtttacctgtaggtcgagtcaatgagcagacacgcactgatcagaatcagcgctccattattgcgagagtgatgattgttctcggcaaaggctcgagagaggagaaatttccagaatttggccttagcgcgttaggtcgactggttcgtactggtggtatcacgctctcagaagatgcccagatcatttaccaatctccaactggattgtttgaacgtcgggtggcactgaaggatttatag

SEQ ID NO: 353 - DNA, 4038 bp, Lactobacillus senmaizukei DSM 21775
atggttgaaaaatatggaattggattagacattgggaccagtaccctgggctggaccagtgtcgatgagaatggcaagattcagcgtctaaaaggtcaaacggcgctggggacacggttatttaacgagggacaaacggctgaggaacgccgtgggttcagaacaacccgccgtcgcatccaacgtcgtcgctggcggctacggttactgcgagaaatattcgacgaaccaattggttccgttgatgcgggattttttgctcgtcagaagatgtcgagcctatcaccgcaagatgaccgattcgaagatacttaccgattattcaataatcaaacagataaggccttccatgacgagtatccaacgacttatcatctgcgtcaggcgttaatgaattccgatcgacaattcgatattcgggaaatctatctggccattcatcatattgttaaatatcgcggaaactttttgcgctcaggtaaaccagccgactttaaaacggggaagcttgatttaaaggaaaagtttgaagagattaatgcagactggcaaacgttaattagtgaagatgccccacaattaccagtcgatgatttgacaaccattaaggccgttttggttgatggttcacgaagtcggtcagatcgacaacgcggattagtaaagctctggatggccaatgagaccgttgagaagaattggaagccagtcatgactgaattggccaaggccattttggggctgaagacaaaattgtatctgttgactggtctcgatttgcccaaagaggaccaaaaggcttggaccttcagtctggataccttggaagaccatcagggagatattgacagtttcttcgatgaccatgctcagcagttgatcgatcggttagccgagctacgggcaatgattcagttaacggaaattattcccagcggcctcaacttttcacagagtatggttcagcggtatgaagcacatcggtctcacttagagatgtataaacagtatgccctggatcagacggatcctaagcgtaccaaggcgttgagagcagcttataatgcatacatagatcaacatgaaattgctgatgatttttatacggcggttaagcgagttactaaggatgaccagagtgaaacggccgaggaaattaaccggctaattgggttggaacagtttatgcccaagcaaagaacgaaggaaaacggggttattccatatcaagtccatcaacaagagttggaccaaatcattgcccaccagaagaagtattatccttttcttgggacggaaaatcccgtaatcgatcaccgagaatctcagccctatatgctggatgaattggtgagtttccgggtcccttactacgtgggcccaatggttgccgccaatcctgagctcaagacgaccgagaatccgtttgcctggatgattcgtaaagctcagggtgaaattacgccttggaacttcgatgagaaggtcgatcgtaagggttcggcgacggcatttatcgaacggatgaagactaccgatacctatttgttgggcgaggatgttttgccacagcagagtctcctttaccaacggtttatggtcttaaatgaattaaataatattcggattgatgatgagttgttgacgaccaatcaaaaacagtgggtatttgatcgtgtctttaaaggaaagggcaccatttcagctaagcatctacaagatgccttgaagcatcatggcgaaactgatggtttgcccaagatttccggactagcagatcctaccaagtttaacagtgctttgacgtcgtaccgtgattttcagaaatggttaccaaatgatatcgatcggaaagacagaactgccgatattgaaacaattatcaattggtcaacggtatttgaagatacgcatatttttgtggaaaagttgaaggaaattgagtggttgacggcagatcaacggcgacggattgccagcaatcgttatcgaggttggggccgcttatctaagcacctactaacagaaatcaaggatgaacagggcctgtcgattatggaccagctttggcgaactcaacataactttatgcagattgtgcatgaaccagactatgcgaagcaaattgaagcggctaataccgtgggtatggccaagcaggacattggaactgttattaatgatttgtacacgtcaccacagaataagaaagccattcggcaagtactggcagttgttaaggatattcaaaatgcccatcatggcgtagcccctagctggattttcatggaagccgctcgcggtgctgaccagaatccgcaacggagtcggcaacgtcagcgtcaacttcaagacttatacgccaagactgccgcagatctggttgataccgaagttcaacaggaattgacggataagattaaggataaggcgaacttcaccgatcggttgatgctgtatttcttgcaaaatggtcaggacatgtactcgaaggaaaaattaaatattgaccgactgtcggagtatgacattgaccatattctgccgcaggccttgatcaaggatgattctttggacaaccgcgtattggttcaccagagtattaatcgaaataagagcgatacatttgcttccgaaaaatatggtgcgaagatgcaaggcgcctggcaccaatggcgagcagcgggtttaattagcgctcgtaagcttcgtaatctggagatgcgtccggatgagataagtaagtatgcgaccggattcattcgtcgtcagttggtcgaaacccgtcaggtcatcaagttggttacggaaattttgagtcatcagtataatccagaagagaccaagttggtttcggttaaggcggggctgtcgcatgagctgcgacgcgaggccggtttgccaaaattacgggatctgaatgactatcaccatgccatcgatgcttatttggcggcacggattggtacgtatcttctaaaacgatatccacgactggaacggttctttgtttatggccaatttcaaacgagtcgtttggatctacggcgatttaactttattcatgatttggtcaaaagcaagcaaggcgttattgtggatagcgatactggggaaattctctgggaccgtcagaaagatatcgactatattaagcacttgatgggcctgaaacatttgctggtcacacatgaagtttatgatagcgctgcggaaatgtatgcacagacaatcttcaaagcttctgataacgacagtaaggttttgattccgacaaagaatgatcggccgacggcgatttatggcggctacacgaagcgacggaatgggtacctagctatcctgaagattactgaaaaaaaggcagaaacttatcgtgtagttggggtgccgactctgtatatgagtcaacttgcaacggcccgttcgcacagtgttgaagctgagaaagcgttgctgaaatcgttgatggcgccagagattttaagcgagtccaaggtagttagttttgaggtcgttgtgagccatgttcatttaaaccagttggttcgggatacagtattcggacccgcccattactttgggctgggaccattccgctatgtacgcaatttccaccagttggttttaccattcaaggatcaggagattttagttaagcgaaccccgactgatgaggaattaaatacagtttttgaagatatttgttggcaagttgagaattacttcgctgtattcgatattaatgggtttcgtaatgccttgaaaaaatcaatcgataagtttgaacaattaccgattgaaaatgtttttaaagacaaaaaactagtcacacaaggaaaaaaagaagtcttggcgtttgtaatgcagggactgcacgcaaatgcaagttatcggaatctaaaggtgtcattaggtattaagacaccgttgggccaactacaattaacaaaattcatgttatcaagggatgctgagttaattgatgaatcaccgacgggcttgtttcggcgaattcggcgtctaaaggatttgtaa

SEQ ID NO: 354 - DNA, 3423 bp, Lactobacillus tucceti DSM 20183
acttgtgtatttttagttaaattggggggatttgaagtggatcgaaaaataagtttggggttagacattggtgtttcatcagttggatatagtgtaatagatgttgatactggtaaagttttagaacttggatcacgcctgataaacggtaaaattggtacagaaaaccaagcgcgtcgagagatgcgtggcactagacgattaatcaatcgaaagaaacaacgtcgtaaggatacagttaaattatttaatgaatttaaattgattgattcaaaaaaagatgaacattattttgaccacttcgcaaataattctgatccgtatgaattgcgagtcaagggattgtctgaaaagttgtcactttcagaaattgccgatggtttgtatcatattgttaaaagacgtggtattagttacgatttaaaagacgctgatgaggaatctgaaggttctgaatatgaaaatggattgaagatcaataatagtgagttaaaaaatcaaactccggcgcaaatacaattaaaacgtttgaatgaatatggtgccattaggggtaaggttgttattgatgaagaaaaaattttattgaatgttttccctacaaaagcataccttgatgaagctaaaagaataatagaaaaacaaagagaattttatcctggaattttaacagaggaatttgaagaaaagtattgtcaaatacttactagaaaaagagactactttgttggaccaggtagcgaaaaatctaggactgactacggtatttataaagaagatggtcgaacactaaataatttatttgaggaattaataggacacgacaaaatataccctgaagaactaagagcttcaggagcatcatttactgcacaactgtttaatgttttgaatgatttaaataatttgcatatttcatcatatgaagatcaaaaattaacgactgaaaataaagaacaaattatttcggaattaaaaagtacaacttcaaatgtcaatatgatgaaacttattcagaaaattgctggttgtgaagaatctgatatcagtggttatcgaactgacaagaattacaaacctgaaattagctctatgcgtatttatcgcaaagtccataaaaaacttttagaatctgaaattgatataactaattggccggatgattttataaataagttaagtttcattttgactcttaatactgaaaatggtgaaattagaaatcaattaaaaaatcgtctgcagccagaatatgattttcttactgatgaattgattcagacaattattgataataaagaaagttttgatattaaatctaataataaatggcatagattctctattaaaacgatggagctgttgatcccagaaatgataaaacgtccagttgaacaaatgactttgataaatgaaatgggattgatcaaaaatagtggcaagaagtttagcaactataaatatttgccatataaaaaaattgctgaagatatatacaatccagtagcatctaagtcagtccgtgaagctttgaagatagttaatgcaattttaaaagaatatggtcatatcgagtatattgttgttgaaatgccacgtgacaaaaatgaagatgaagcaaaagatcaaatcgaaaagttccaaaaagcaaatggacgactaaaagatgctgcattggaagaattcacagaggcgattggagataaatccaccgttgacaagaaattgggagtacataggtctaaactcctttttaagataagactttggtatcaacaaagaggaatggatctatatgagggcaaaccaatatctgcagttgatttgttaaataatcctgatagttttcaaatagaccatattattccacagtcagtttcttttgatgatagctttaataataaaacactttgtaattctggcttgaatcaaattaaagataaaaaaacaccgtttgagtatatgaatgagggatatggtcaaggattcgattcaatgaaggccatggtaatgaaaaatccaagaatagatcataataaacgtaaaaattatcttttctctgaaaatgttagtgacattgaaactagaaagaggtttatttctcgtaatttagttgataccagatatgcatccagggtagttttgaataatttgcaggagttctttaaagaaaaagaatcggatactaagatttccattattcgtggtaaatttacttccaatttacgcaagcattggaagataaacaagaatagagatacttatcatcatcatgcaatagatgccactataattgctgcaacgccatttttaaatatttggaaaaagggttctagtattttcccttcaaatgttgaaagtgaagatttttttgatattaagactggtaaaattattggaaatgatgagtttaacaaatatgcgtatgatgaaccttataatggcttttataatgaacttaggaatgctactgatagaattaaattctctcatcaaattgataaaaaaatgaatcgtaaagttagtgattcaacaatttattcaactagagttgcaaaatcaccaaagaataaaaaagaatcagaatatatagttgcaaagatcaagaatatttatgatgcagatgaatatgctaaatttaagaggatttacgataaagacaagactaaatttttattaaataagtatgatccaaggagctttaatcatttagaaaagatcatgaatacttatcctgattcaattgaaagaacaatgagtaataataaagtgaaggtagtaagaatctcaccatttgaactttatcgtcaagatcacggtccagtaaaaaaatattccaagaaaaataacggacctgaaataaagcaacttaaatacttggataaaaaagtcggttctagtattgatgtcacacctgataacgctaaaaataaacacgttattttgaagtcattgaaaccatggcgcacagatatttatttgaatcatgaaacaggtgaatacgaaattatgggtatcaagtattctgatctcaagttcaataagggtgaaggttatggcattaaaaaggctaagtatttagaaataaagcatcgggaaaaagtttctgatgattctgaatttatgtttactttgtacaagaaaaatcgtattaaggttgagaatatggagactgatgaaagtgttgagatgctgttttggtctaggaccatggatagccaaaaggggtatgcggaactgaagccaatttataaatataaaacagaggatgataattggccaatttatgggaatgcaaagaaacaaattataaaaaaactgattcccaaaaactgtaaaatatggaaagtaaatactgatgtattaggcaatcctttttatgtagaaaaagaaggagaatatcctaaagatgtccttgattaa

SEQ ID NO: 355 - DNA, 3942 bp, Lactobacillus versmoldensis DSM 14857
aaaaataatctctggggcgcgcgcttatttaaagaagcagagaccgctcaagttaccagaggtcatcgttcaatgagacgtcgttatcgaagaagaagaaatcgtttaaattggctggatgaattattcgcagatgaactagctaaaatagatccttcatttttattacgaatgaaaaattcttgggtctctaaaaaagaatccactcgtaaacgtgacccttacaatttattcattgatgagaaatataatgatgtggattatttcaatcaatatccaacgatattccatcttcgtaaggaattgatcactgaagataagaaggtcgatatcagactaatttatttagcaatccacaatattatcaagtaccgtggtaacttcactcttgaaaatcaaaattttgatatttctcaattaagcagtaatttttcacaacaaatcagtgacttttttgctttgtttagtgattttggagtcatcatgcctgaagatttcgatcccgacaaaatcagtgatattttactgaatcccaatctttcaccttcgggaaaagtttctgaggcaatagcaactatctctccaaaaactaacgtaaaagccaaaataaaaattattttattattacttgttggtaacaacggtgatttgaaaaaattatttgatttagaaacaactgaaaaaatagctgttaaattatcatctcgacatatcgacagtgaattgccaatcattttatcagaactgaatgagcaacaagaaaatattattaccattgccaattctatttttggttcaatcattctaaaggactttcttggcgatgagacctcaatcagtgcggcaaaagtaatcagttttgaagatcataaacaagatcttcaaaaactgaaaactatgtggcgcgagacttctaacaaagaagcagtcaaagctggtaaaaaagcttatgaagattatattggtcatgaggactctgaaactttttacaaaaaaatcaagaaatttttggagaaagctcaacctgttgatcttgcaaataaggcactggcagaaattgaattggaaaattatctacccaaacaacggaaccgaaataatacagttataccttaccaactcaacgaaaacgagttgattgccattctagaccaccaagaaaaatattatcctttcttaaaagaaaatcgtgacaagatactttccttgctcacatttcgaattccttactacgttgggccattacaagactctaacaacaatcgtttttcttggatgacccgtaaagcaagtggtgcaataagaccttggaatttttctgagaaggtcaacgttgaacaatcttcaaatgatttcatcaaacggatgcgttcgaccgatacttatttgatcggcgagccagttctaccgaagaaaagcttgatctatcagtgctatgaggttctatctgaattgaacaacacccgtgtaaaggatggcagtagcaatcctaaacgcttagatgtcacaattaagcaacgcatttacaatgaaatatttaagaatcaaaaatcagtttcagttaaggtattgcaaaactggctgataaaagaaagctattttaaatcaccagaaatctctggtttagctgacaaaaagaagtatttatcatctctttcgacctacattgatttcaagaaaatttttggacagaggtttgttgatgaccccgtcaattcgccgcaattggaagaattagcagaatggttaacactctttgaagataagaagattctgttaatcaaattgcaaaactctaaatactcttatgatcaagccactatcaataaattatcgacgatgcggtatcaaggtactggaaaactttcaaaaaaattattagtagatttgaagactactaaaaagtcaattggcaaaagtggcgctgaatctctttccatactggatttgatgtggtcgactaaagataatttcatgcaaatcatccacgatgcagattatacttttgagcaacaaattaaagaattcaactatgatacggaagatgagctgacgcctttggaaaaagtggccaatttacatggctcacctgctttgaaacggggattgaatcaatcgatcaaggttgtcgcagacatcgtcaaatttatgggccacgatccagaaaaaatctttattgaattcactcgttctgatgacttcagcaagttgactatttctagataccgtcggatcaaaaagcagtatctagaaattgccaaggcaatcaaaaaaataccagcagaatttaaagacatcaaggaatatcaaactcaacttgaggaaaataaaggcaagttggcaagtgaaagactgatgctatacttcctgcaatgtggtcatagtttgtacagtaataagccgattgatttaaatatgatcaatagttctaagtatcatgtagatcatatcttgccacaatcttacattaaagatgactctcttgagaataaggctttggtcttagcttcagaaaatgaaaataagatcgacaacatgctgatcagtcatgacatcattgctactaacttaccacgctggcaggctttgaaagaccagaatttgatgggatccaaaaaatttgctgatttgacaagaacaaccgtgactgaaaaccagaaaaaaggatttattcaaagacagctagtccagacttcccaaatcgttaaaaatatcacactgattttaaatgatctttataaaaatactagctgtattgaaactcgagctactctctcaagcgaatttaggaaagcctttagtaatttcgacgaaactacttatcattatcaatttcctgaatttgttaaaaatcgagatgtcaatgattttcatcatgctcaagatgcttttctcgcttgtgttatcggtgaatatcaactaaaaaagtatcctaaagataatttacgattagtctatgaccaatattcaaagtttctcgattcactaaaaaaagacacccgcaaaaaaaatggacggatgccaagatacactcaaaatgggtttattattggatcaatgtttaacggtaagacctacgttgatgacaacggtgaaattatttgggatcaaaaaatcaaggagtccattcgtaagacctttaattatcatcaattcaatgtcgtcagacaaaccattgaacagcatggaaaacttttcaacgacactatccaaccacacagtgacaggtataaattgattccattgaagaccaatcgtgacccagctatttacggtggatacaataacgataacaatgcctattctgttgtgctggatgttgatggtaagaaaaaaataaacggcattcctattagaattgctaaccaactcaaatctgatgaacttgatctaagcagttggcttgaaaataatatcaaacacaaaaaaccaatgactattttaattgataaagtcccaaagtatcaacgaattatcaatgaagaaacaggtgacctattgattacttctgcaaacgaagtaatcaacaacgtacagttgttcctaccaagtatgtacaccgcattaatcagtttattagattcgacaaaaactgaaatgtattcaaaacttttaagtaactatgaagcaaacattttaatagatatttacgattatctactgactaaattgaaaaataactacccactttatcgaaaggagtgggccaaactagctgaacatcgtgatgactttattgaatctgatctggtaacgcaagccagtactctgcaacagttaatcaagtttatgcatgctgatccttcaaatgttaatttaaaatttggtaattttaaaggcaaccgttttggtcgtaaaaatggcaatattaaactgtcaaaaactgattttatttatgaatcaccaaccggattatttaaatcaattaaacatatcgactaa

SEQ ID NO: 356 - DNA, 4068 bp, Lactobacillus zymae DSM 19395
aagggatttattaatttgtacaaaaaatacggtattggattagatattggaaccagttcaattggctggtccgtggtggatgagtacggtcacatcatccgggtcaaagggcaaaccgggttaggtgttcggctttttcgggaggggcaacccgcagcggacagacgaaccttccggacgacgcggcgccgtttggggcggcgccggtggcggttacggttgctacgtgagatttttgacccatacattgccgcccaagatccaaacttttttgcgcggcaaaaggcgtctgcaattgccccgggcgattcgcgcttcaaggccgtttatcggctttttaacgaccaaaccgaccggcaattctacgataagtacccgaccgtctatcatttgcgccagaagttgatgaccgaaaaacgtcagtttgatatccgggagatttatttggccgttcaccacatcgtgaagtaccggggccactttttaactggtggtgccgcgaaaaactttaaaccagggaagctggatttaaacacctattttgcaacgattaacgcccaattagcggcaattttcatggattcacaggtggagcttccccaattggattgggatgcggtggtgtcattgttgaccaacgaccaggaatcgcccagtgaccggcagaaggcgttgactaaaatgctggtggctcagggtgatgcgacgcaaaaacggttctataccgagttttcgaaggccctgctggggttgaaagctaagctttacgttttaacgggattcgagggggataagactgaccaaaaggccttaacgttaagtttggagactttagatgaccatcaagatgatgttactcagttattgggggatgaacagcgtcagttggtagaattattggccagggtgcagtctgcaatccagcttgccattattattcccaacggcaagacgttctctggccagatggttcagcagtaccaaacgcattatgaccaattgcggctcttaaaagactatcgggaacaattaacggatcaaaaacaccggcgggccctgaaacaggcttacgccgactatctggcaaatgatcaagatcaggatgccctagtcaaggcggtagagaaagttttaaagcagaatcagccgcttagtaccgtgggcgtacggttacaaactgccattgacgcgggggactttctgcccaagcagcgaaccaaggcgaatagcgtgattccgcatcaaattcatcagcaagagttggaccgaattatcgaagctcagtccgtttattatccttggttagctgaggaaaatccggtggcagcccatcgcagctatgccccatataagttggacgaattagttgattttcgggttccatattacgtggggccactagtacagccgcaagcggataaagcggctaaggaaaccaagtttgcgtggatgacgcgcaaggaagcccagtcgaccacgcccatcacgccctggaactttgagcaagaggtggaccgtaacgcctcggcgaacgcattcattcaacggatgaagaccacggatacctacctattaggcgaggacgtgttaccaaaaaatagcctgttatatcaacgcttcgaggtattaaatgaattaaacaatgttcgcgtggacggtaagctattgacgattgccgaaaaacaacgactttttcaggacctatttgttgaccggtcacaagcgtcagtcaccatcgcgcaattacaagccaatctcatcgcgcacggtgccgctaaggaccgggtcgaaatcaaagggttggctgatcctaagcgtttcttgagcagtttaacaacgtatcacgattacgctcaaatcattccggaagccttggaacaaccggacaagcgtgccgatattgaaaaaatcatcaactggtcgaccatttttgaagatacgtcgatctttaaagaaaagctgcaggagattgcttggctcacaccagaccagcgccgccagttaagccaaaagcggtaccgcggttgggggcaactctctgataaattattaactcagctgcgcgatgcgacggggcagtccgtgatggatttactatggactgaaccgaataactttatgcagatcattcgtcgaacggaatttcagcaggcgattgcgagagtgaaccagaccgacctgaagcaacaggacttagcgacaacaatcaatgatctgtatacgtcaccgcaaaacaaaaaggcgattcgccaggtcttattagtggtcgccgatattcaaacggcgatgcacgaagtggcgcctagctggctattcatcgaagcggcacgcgggccggaacagaatcctaagcgtaagttagcccgccaacagcaactgctagaagcctataaaacgagtgctaaagaaattgttaacgaagccgttaaggaaaagttactgtcggcaattgacgaccatcaaaaattcgaggatcaggtagtcctgtacttccaacaaaatgggctcgatatgtatacggggaagccgttagactttgagcgcttgtcgaagtaccacattgaccacattattccccagtcggtggttaaggacgattcactggataatcgggtgctgaccacgccagaggaaaatgaacgaaagggtgcccgggtccccggaccgttgtacgcgagtcagcaaggccggtggcggttattgcaacgggccggcttgatttcccaacggaagttggaccacctactcttacggccggaggaattagaccaacaggctacgggctttgttgctcggcaattggtggagactcgtcaggtgattaagttgattaccaatattttgagccaacagtatgatccggaacaaacgaaattggtctcggtcaaagcgggattgtcgcatcaattccggaccaggttaaacctacccaagctacgggaactcaatgattatcaccatgcgcacgatgcctacttagcagcacgaattgggacctatttgttacaacggtaccccaatctagaacggttcttcgtttatgggcagtatcagaaaacacggtttgacttaaagcggcattttaactttattggggagatgttgaaaggcaagccagaggatgcggtgattgttaaggcaccacactcggagaccgttatttgggataagcaggatgaagtcaaacagctgaaaaaaataatggaatacaggcatttattagttactcatgaggtttatgataaccatggcgcactatttaatcaaaccattcatccggctaaaaatcctaaaaacagaaagttaattccgcgcaaaaccactcaatctacagaactgtatggtgggtatagtggtgaaacaaccggctatttagccatcgcacggacggttactaagaacaagataagctatcaagtattgcgggtcccgacgcgtttggtggggcgcctgcaacgaagtagtgagtccgcacaacgacagattctgacggactggtttgcacctagctttgtttcccggggtaaacaacagccgtttgaaattgtcttacgccatgtatttaaaaatcagacagtgattgatgatattcatgaacaatcacatcgttttggattgagatcagatacttattattgtaatcagcagcaactggttttgtcgctagaacagcaaagaatgataattgatcagaaattaaataatacgaataagttgatggtggtttatgaagctgtttgtgatcaagtggcgaaatattttccactttatcgaatgaatcactttaaggaaagtttgttagaggcgggcccgaaattagccgagttgccaattaataccgtacaatctaaaaacggaaaattgaaattagggcaaagaagtgtccttctacagacaatgcaaggattacatgctaatcctgagacaaaggatttgtccattattggatgccctaagtattttggaaagttgcaagtttcatcaggtattaagttaactgagaatgccgtgttaattcatgaatcaccaactggattattccaacgacgcgttcgtttaagtgattta

SEQ ID NO: 357 - DNA, 4068 bp, Leuconostoc gelidum JB7
atgacatattcaattggtttagatattggaacaggttctgttggatgggctgttattggggatgattatcgtttaaagcgtgctaaaggtaaaaacttaattggcgtacgactatttgactcagcaacaacagcagctgaaaggcgtggttatcgtacgacgcgtcgacgtttatcacgccgccattggcgtttgcgtttgttaaacgatatttttgcatcagatttagcagaacaggatgaaaattttttgccacgactcaaatattcatgggtcaacccagatgatgagcaaaatccgcagttgaatagcgatgttgcaaacggtgcgttgtttggatcaagcgagacagataaagcatttcacaaaaattatccaacgatttatcatttgcgacatgaacttatgacagatacggctaaacatgatttacgtgaagtttatttggcaattcatcatatcgtaaaatatcgtggtaattttttaaatacagcagataaaattaacgcagagaattcgttcaatgttgacctatttatagcagcgttagacgaatataatgaatttctagaaacacctattacatcaattaaggatgcgcaattattttcagataagctaactgacataaacgctcgtaacaaatctgtccgtgtagaaaatgcaatgtcagaaacttatgatgataaatctaaaatatttaaagctatattgacagcactagtaggtaatacagctaactttcaaactatttttgacttatctgatcttgaaaaagatgaagctaaaaatttcaaatttaaacttgacttagaagatgtcgagacaaaactagatgttgtgcgagcaaaactttcagatgaacaaaatgcttttctagaggctgttttaatagcgtatgatggtatcactttaaaaatgattttgggtgattataaaagtattagtcaatcaatgattgaaagttataagtcacatcaacgtgattggaagtatattaaaaataatgtgcgattaaacgagcaaaaaattgaaccagacaaaaatagtgttaaattttttaaattagatccaaaaaaattgatatatccatcaaatttggcttatttacaggtgatttcgtcaaatgaagatgagcatagaaagggtttggactattttaaaacagctattcaagatgcggatattttacaacgtattgagaatgatactttcttaccaagacaacgtacaaaacggaatggcgttttgccatatcaattacatttagcagagttagaacaaattattaaaaagcagagcaaatattatccatttttagctaacatatacacgcaagacaataaaacagaaaacaaattgatcgggttattgaaattcagagtaccatactatgtcgggccacttgttgaagcagaaaaagttacaggagatggtaaaaatcattggttaattaaaaaagaactgcaagaaaacacaccaattacaccctttaattttgatgacgttgtagataaagataaaagtggtgagcagtttatcaaacgcataactggtactgatagttatttaattggagaaccaacgttaccagaaaattctcttttgtatcaaaagtataacgtgttacaagagttgaacaatgtgcgcaatgaaagacatcaacggttaccgattaaagtgaaacaagatatatttgaacatgtttttaaaattgataaaaatgttaatgctaaaaaagtgatggcctatctcaaattaaatggatatggtgattttcaaatagctggtttatctgatacacgcacaggcaagtttaatagtaatttgtcaagctataattactttgttgacctactcggtcgcgaaaaaaccgaaaaaattagggaagatagattagaagaaattattgaaatacaaactgtgtttgaagataaaattctcgtcgctaaacgactatctaatctagactttttaacgcctcaagaaaaaagcaagctatcagcaaagcattacactgggtggggcaggctatcgcagaaattactcacaacgcaatttataaaaacggctctatctgaagcaggggatatcataccacagtcacacagtataatagacttgctctactatactgataaaaatttaatggaaattttgaatgataaaacattcaatgtacgaaattggctgacagaacagaataaaggaacagagtctggcaatagcctctatgatcaaattgatgctttggcaggtccaaaggatattaagcgtggtattacacaagtgtttagtattattgatgatattaaaaaagcaatgggtagcaatccagaaacagtgtatttggagttcgcccgtgaaacacaaacttcacgtttaacaaattctaggttaaatcgtgtgcaagaaatatacaacagtccagaattaaagactgaatttgcatatctagccaagaaattagaagctgaaacaaaagagtcaattcatgatgatagattatatctatattatctacaagaagggcgggatatgtacactggaaaagaaattccgtttgatcaaataagcagtaactatgatattgaccatattattccacaggcatttacgaaagatgattcacttgataatcgtgtactggtcaaccgtgcaacaaatgcgagaaagtctaactcgccaacctttacgaatgatattattgataaccggaaatcttggtggcaatcattggtcaaacgtggtttaatgtcaaaagaaaaatttgaacgtttgactgataagcgtaaaacctttagcgagaaccagacaaatcattttattgcccggcaattagttgaaacgcgccagattattaaaaatgttgctgacttgattaagaataactatgatggcactcaggcagtcgcaattcgagcatcattaactggtgaaatgcgccgttatttggattggccaaaaaatcgtgacatgaatgattatcatcatgcacatgacgcgttaatgatggcaactgttgggaagtatgttgataggcgtggcttttttgataatggcagtgtcagtgatggtgctggaaatgcctataacttatatactaaagattggttagtcgcagctcgtgtaggaactagaaatgatagtcaacgtgttaatccttatggttttattgttgggtcaatgaattcaaaagcagttcgacaacaggtaaataaagaaaccggcgaaatagtctggggtaatgaaaacttagattatttacgtcatgtgttgagttataaaaaaatattagttacacgacgattaagtggctcatctggccgattgtatgcggagacgttgttcagcccaaatcccaaagctaaattaattgcacaaaaagctaatcgttcggttgcattatatggtggtttcacaaaagctgaatctgcctatacggcgctggtggaatttaataagaaaggcgacaggtcgtacaagctgataaaggtgcctatggcaatagccaatcgtgttaatgataaacaaataactgtaacggcatacattgcatctttaaatttacgtgattttagtcgcgttgttcttgaacatttaccgctcggcactttgattcgagaatctgatggtagtgaattttatgcagctagttcagaatataaacataatgcgaaagaactttgggcgcctaaagaaattttgagaagttcaaaaaaattagataaagcaactgctgataatttaattgatatttttgattttttgaccaatgataaaacaatcagtaattttaaattttatgagaaagatttattacacttgaaaaatgttcgtgataaatttgttgaagcaagtgatgaaatcaagattaaagttttatcggatgttatttatgaattgcataatgatgctgggtggcgcgatccgtttaaacatattcaggagaaacctgcttggactatgttacaagtcaagggtgggatcaagttgtctgagaaagcggcaattgtatatcaatcacccacagggttatttgaaacaatcaccattgttggtgaataa

SEQ ID NO: 358 - DNA, 2676 bp, Leuconostoc pseudomesenteroides 4882
ctgaagcgcacaaaaggcaagaatttgattggggtacgcctgtttgaaggagctgatactgctgctgaacgacgtggttatcgtactacacgccgtcgtttatcacgtcgtcggtggcgtttgcgattgctgaatgatatttttgcatcggagttatctaaaattgatgaaaactttttgccacgcttaaaatatagttgggttaataaaaatgatactgataatgtacactttggtgtaggggtttttgataattctgaacaagaaaaggctttttatcaagattatccaacaatttatcatttgcgccaaaagctgatgacagacaatcgacaacatgacttgcgtgaagtttacttagcgattcaccatattgttaaatatcgtggccattttttgaattcaggtgaaattagtgcaaatagtagttttgatgcgcaaaaatttctggaattattgcgtgaatttgataatactttttatcccgatgctgttaagtttttaaacttagatcaattggatttaccagataaaatttcttctgaaatcagtgattcgaaaataagtaaaagtgaacgagttgacagggttttgcaacatgtacaattagcgaactctggtgcgaagaagatactgaaagccatattaaatgctgttgttggtaactcagttgacagtgttgctatgttttcgcttagtgatttggataaggaagaaaagaaaaaaatcaatcaccctgtaactgatagtaaaccctttaagtattctgataaagaggttgaggctaagttggatgagctctctaatttattacaagatgagcagaaaattgaattcttgtcgttgttgaaattatcttttgatggattaactttaaaaatgttacttggtaacgctaaatctgtgtctgaagcgatggttgaacgttataaagtgcacaaggacgatttaaaattcattaaggaaaatattttaaattcatttagtaaggataagaagaaagaatttgataaatactatgaggctcatttagcggaaaaagacgttgataatgttgataagtattttaagaaaataattgacgactcgataatttcaaaggataagaaaattgagttattgcagaaaattgatgatcatgattttttgccgtcacaacgaagcaaaattaatggggctattccgcatcaactacaccgtaatgaattagataaaattatttcgcaacaaagcaaatattatccatttttagccgattcgtatacacaaaatggtaaaactgaaacaaagctcgccggattggttaattttagagtgccatattatgttggtccactcgtttctaaagaaaatgctgatcgtaataatcctgacggtgggcaaaatcactgggtagaatttaaagaaaatactagtttatctaatctaacaccatggaattttaatgaaattgttgataaagataagtcagcagcgaagtttatcgagcgattgacaggaatggatacttacttaattggtgaaccgactttgccgcaaaactcgttgctatatcaaaagtataatgttttgcaggaacttaataacatccgtgtagataatcacaaattagatgtgaaaattaagcaagatgtttttgaacatttatttaaaacccaaaatagtgtttctgctaaggatgttaagaattatttaattgccaatggttacgctgcgccaagtatacaaatcacaggcttatcagatacgaatgaaaaaacttttaatagtaaattgtctagctacaattatttggttgataagctgggtagaacttttgttgagtcagtcaaatcagatgtcttggaaaaaatcattgaattgcaaactgtttttgaagataagactgtactgttaagacaattatcaatgatttcagaattaacattggcgcaagcaaatcaattagctgaaaaacactggaccggctggggacggctatctcgcaagttgttatcttcaaaagtagttgatgttaataaaatcacaaattcgacattttatcctgcaacaagtagacaaactatcatcgacacactgtatcatacacaacttaacttaatggaaatcattaataatgcagaggacttatatggtgttcgtcagtggattagtgaacaaaataaaagtgatagttcagatactaatgatgtctatgatcaaattcaagaactagctggagataaaaagattaagcgtggtattacgcaaagttttcgaatacttgatgatattgttaaggcgatgggtggggaacctgaacgggtttatttagaatttgccagagaaaatcaacaatctggtgtatctttttctaggaaaaatttactgtcaaaattatacgaaaatgattctctaaaacaaacattcaaagaacttaaatctcaacttgagagtgaaaccaaagaaaatctacaaaatgatcgcctatatttgtattatttgcaacagggacgagacatgtattccaatgatgagttaaatattgatcagttatctagctatgatattgatcacattattcctcaagcttacaccaaagacaattcgtttgataatcgtgttttagtttcatcaaaagcaaatcgcctaaaacgaatgcttctgtggtacccagtgaagttgtcgaaaaaatga

SEQ ID NO: 359 - DNA, 4179 bp, Oenococcus kitaharae DSM 17330
atggtttttatggcacgggattattcagttgggttggatattggaacgagttctgttggctgggcggcgattgacaataaatatcacttgattcgagcaaaaagtaagaatttgatcggagtcaggctttttgattctgccgttactgcagaaaaaagacgaggctatcgtacgacacgtcggcgattgtcacgcaggcactggcgtttaaggctattgaacgacatatttgcagggccactgacagatttcggggatgaaaattttcttgcacgtctcaaatattcttgggttcatccacaggaccaatcaaaccaggctcattttgccgccggactcttgttcgattccaaagaacaggataaagatttttataggaaatatcccacaatctaccatttacgattggcattgatgaatgatgaccaaaagcatgatctcagagaagtctatttagcgattcatcatctagtcaaatatcgtggtcactttctcatcgaaggcgatgtgaaagcagattctgcttttgacgtacacacttttgcagatgctattcagagatatgccgagtcaaataattcggacgaaaatttacttggtaaaattgatgaaaagaagttgtctgctgcattaactgataaacatggttcgaagtctcaacgcgcagaaacagcagaaactgcttttgacattttagatctacaaagcaaaaaacaaattcaggcaattttaaaatctgtcgttggtaatcaagctaatttgatggcgatatttggcttggattcatcagctatttccaaagatgaacaaaaaaattacaaattctcttttgatgatgctgatattgatgagaaaattgcagatagtgaagcattgctgtcagatactgaatttgagtttctttgtgatttaaaggcggcttttgatggtttgaccttgaaaatgcttctaggcgatgataaaacggtcagtgccgcgatggttcgccgctttaatgaacatcaaaaagattgggaatacataaaatctcatattcgtaatgcaaaaaatgccggcaatggtctctatgagaaaagcaaaaaatttgatggtatcaacgcagcctacttggctttacaaagcgataacgaggatgatcgcaaaaaggccaaaaaaatttttcaagatgaaataagttctgccgacattccggatgatgtaaaagctgattttcttaaaaaaattgatgatgatcaattcttaccaattcaaagaacaaaaaataatggtacgattcctcatcagcttcaccgtaatgaactggaacaaattattgaaaaacaaggtatttattatccatttttgaaggatacatatcaggaaaatagtcatgaactgaataaaataacggctctaattaattttcgtgtgccgtattatgtcggccccttggtagaggaagaacaaaaaattgcagatgatggaaaaaatattcccgatccaaccaatcattggatggtaagaaagtccaatgatacgattacgccatggaatttaagtcaagtcgtagatttggataaatcaggcaggcgatttattgagagattgacgggtacggatacatatttgataggcgaacccacattaccaaaaaattcgcttttgtatcagaaatttgatgttctacaggaactaaacaatatccgagtatccggccgccgtttggacattagggcaaaacaagacgcattcgaacatctttttaaggtacaaaaaacagtctcagcaacgaacttgaaggattttttggttcaggccggttatatttcagaagatactcaaattgaaggattggctgatgtaaatgggaagaattttaataatgcactaacaacctataattatcttgtttcggttttaggaagagaatttgttgaaaatcctagcaatgaagaattgttggaagaaataacagaattacaaaccgtttttgaagataaaaaagtcttgcgcaggcagcttgaccagttagatggcctttccgatcataatcgagaaaaactgtcaagaaagcattacaccggttggggacggatttcaaagaaacttttaaccacaaaaattgttcaaaatgctgataaaattgataatcagacttttgatgttccccgtatgaaccaaagtatcattgatactctgtacaatacaaaaatgaatttgatggagattattaataacgcggaggatgattttggcgttcgggcctggattgataaacagaatacgacggatggggatgagcaagatgtttacagtctcattgatgagttagctggtccaaaggaaataaaacgtggtattgttcagtcctttcgaatcctggatgacatcacaaaagctgttggctatgctccgaaacgtgtttacctagaatttgcaagaaaaacacaagaatcacatctaactaattctcgaaaaaatcagctaagcacattattaaaaaatgccgggctgtcggaacttgtgactcaggtgagccaatatgatgctgccgctttgcaaaacgaccgcctatatttgtactttttgcagcaaggcaaagatatgtactctggcgaaaagttgaatttagataatctttcaaattacgatattgatcatattattccgcaagcctacacgaaagataattctttagacaaccgtgtgcttgtcagcaatattactaacaggcgcaaatctgattcgtcaaattatttgccagctttaatcgataaaatgcgcccattctggtctgtgctttcaaagcagggcctattgagtaaacacaaattcgctaatctgactcggacacgtgattttgatgatatggagaaagagcgttttattgcacgttcgctggtagaaacacgccaaattatcaaaaatgttgccagcttgattgattcgcattttggcggtgaaacaaaagccgttgccattcgttcatcattaacggctgacatgcggcgttatgtcgatattcctaaaaaccgtgatattaatgattatcaccacgcgtttgatgccttacttttttcaactgtcggtcaatatacagaaaatagcggactaatgaaaaaaggtcagctttcagacagtgcgggaaaccaatataatcgttatatcaaagagtggattcatgctgctcgtttaaatgctcagtcgcaaagagttaatccatttggttttgttgttgggtctatgcggaatgctgctcccggaaaattgaatccagaaactggtgagattacgccagaggagaatgctgattggtccattgctgatttggattatctgcataaagtgatgaattttagaaaaataactgtgactcgcaggttaaaagaccaaaagggccaattatatgatgaaagtcgttatccatccgttttgcatgatgccaaaagcaaagcatccatcaactttgataaacacaagcccgtagatctatacggtggatttagttcagctaaaccggcctatgctgcattaattaaatttaaaaataagtttcgattggtcaatgtgctgcggcaatggacttattctgataagaattctgaagattacattttggaacagattcgtggaaaatatcctaaggctgagatggtcttgtcacatataccatatggccagttggtaaaaaaagatggtgctttagttactatctcatcagcgactgaattgcataatttcgaacagctatggctgcctttggctgactataaattaattaacactctcttgaaaacaaaagaggataatctcgttgatattttgcataaccgcttagacttgcctgaaatgactattgaatcagctttttacaaagcttttgattcgatcttatcttttgctttcaataggtatgctttgcatcaaaatgcattggtaaagttacaagcacatcgtgatgactttaatgctttaaattatgaagataaacagcagactctggagaggattttggatgccctgcatgcgagcccggcttcttcggacttgaagaaaatcaatttatcgagtggattcgggagattattttctccctcgcatttcacattggcagatactgatgaattcatattccagtctgtcactggtttattttctactcaaaaaactgttgcacagttgtatcaagagacaaaataa

SEQ ID NO: 360 - DNA, 4137 bp, Pediococcus inopinatus DSM 20285
atgaaaaataaggactatagtatcggattagatattggaacgagttcaattggctttgcggtggtcgatgaaaataaccatgtcatgcgcgtaaaaggtaaaaatgcgattggggtgcgtctatttgatgagggaaagccggctgccgatcgacgtgcttttcgaactacacggcgtcgcctgagtcgccgtcgctggcgcttaaagttattacgtgaaatctttgattcgtacataactcccgtggatgaagcattctttattcggttaaaagaatctaatttatctcctaaagatagtaaaaaacaatattcaggggatatcttatttaatgatcgttcggataaggatttttatacaaaatacccaacaatctatcatttgcgtaatgcattgatgaccgaacatcaaagatttgacattcgtgaaatttatttggcaattcaccatattgtcaagtttcgaggccactttttaaatgccacgcctgctaataattttcaagtgggtaagcttgatttggaccaaaaattcgaagatttaaatgatatatatcaacgtgttttccctgacgattcaattgaatttcgaatagataatttagagcaaattaaagcagttttgttggacagcaaacgaagccgatctgatcgacaacgatccttagttgacgatgtttatcaaacgtctgaagacaaagaagttgagaagcaaaataaggctgttgcaactgaagtattaaaagccattcttggaaataaggcaaagctaaatataattgctaatgtagaagtggacaaagaagctgcaaaagaatggacgatcacgtttgattctgaaagcatagatgatgatttagctaagattgatggacaaatgacggatgacgggcgcgcaattgttgagattctgcgtagtttatactctggaatcacattatctgcaattgttcctgaaaatcatacattatcacaagcaatggttgcaaaatatgacctgcataagaaacatttgacactgctaaaaaaattaattaatagtatgacagataccaagaaagccaagaatcttcgtgcagcatacgatgggtatgttgatggtgtgaaaggtaaagttttaacccaggatgagttttataaacaaattcaatctaatttggatgagtctgtggaagctagtgaaattcaaacttatattgatcaagatatttttatgccaaagcaacgaaccaaggcaaatggctcgatcccgcatcagttacaacaacaagagttagatcagattatcgaaaatcaaaaagagtattatccttggttagcagaattgaatcctaatcctgataagaaacggcaacagcttgccaaatataaactagatgagttagttacatttagagtgccatattatgttggtcccatgattactgcagaggctcaaaagaaacaatcaggtgctgaatttgcctggatgattcgtaaagagagtggcaatattacgccatggaactttgatcaaaaagtcgaccgtatggcaacggccaatcaatttattaaacggatgactacgacggatacttatttgttgggtgaagatgtattgccatcacaaagtttgttatatcaaagatttgaagtcttgaatgaattgaacaaaattcgaattgatcgcaaaccaatttctgttgaattgaaacaacaaattttcaatgatttgtttaaaaagtttaagaacgtgacaatcaagcatcttcaagattatcttgttgcacaaggacagtattctaaacgaccgcttattgaaggcttagcagacgaaaaacgattcaatagcgggttaagtacctataatgatttctgtggcatttttggtgcgaaattagttgatgaaaatgatcgacaagcagacttagaaaaaattattgaatggtcaacaatttttgaagataagaaaatttaccgtgctaaattaaatgatctggcctggttgacagacgagcaaaaagataaattagcaactaagcgttatcaaggatggggcagactatcaagcaagctattaataggcttacaaaattctgagcatcgcaacattatggatcttctctggattggtaatgaaaacttcatgcaaattcaggctgattcagattttgctaagttaattaaggatgctaatcaaaacgcactccaaaataatgattcacaggatgtcattaatgatctttacacatctccacagaataaaaaggctattcgccaaatcttgttagtcgttcatgatattcagaacgctatgcatggccaggcacctactaagattcatgtggaatttgcgaaaggagaagagcgcaatccacgtagatctgtacagcgtcaaagacaagttgaagcggcttatgagaaagcgtcaaatgagttagtaggcgctaatgttagagaagaactgaaagatgcgattactaataaacgtgatttcaaagatcgtttattcctttacttcatgcagggcggagtagatatgtatagtggagaaccaatcaacattgataatctttcacgctacgacattgatcatattcttcctcaagcttttgttaaggatgattcgttaaataatcgtgttttgacggatgcagaaaagaatcgacgtaagtcagatgctgttcctaatgagctttttggtgcgaagatgcgtgtaacttgggaaagaatgaaggaacaaggattaatatcaaaaggcaaatatcgaaatttgactatgaatcccgaaaatattaacaagtataccgaaaatggctttattaatcgtcaattggtggagacacgtcaggttataaaattagccgtgaatattttggctgatgagtataaagaaaatacgcaaatcatttctgtcaaggccgatttgtctcatcaaatgcgtgaagattttgaattgttaaagaatcgtgatgtaaatgattatcatcatgcttttgatgcctatttggcagcgtttatggggaattatcttctgaaacgttatccaaaattgaggtcatactttgtttacggtgattttaagaagtttacacaaaaggaaataaagctaagacgctttaactttatctatgacttgaaacatgaagaccaagtaatcgataaagaaactggagaaatattatggaataaaaacgaagatattgcatatattcgtcatttatttgcgtataaaaagattcttatttctcatgaggttagtgaacgtcgcggggctttatataatcagacagtttataaagctagtgacgataaagccagcggacaaggaagcaagaaattaatccctataaaatctgataaacctactgaaatatatggtgggtacacggggagaacgttagcttatatgactatagtgaaagttacaaaaggtaaaaaaattagttataaagttgtgggggttccgaccgctgttttggccaagatggctggcgtaaggcaaggctcacaagaagaacaagacaaattgtatggtgttttgaagccacaatttacgcatcaaaaggaaaataagaaaaccggtgaaattactgagacagtggataaatttgatattattgtgccaaaagttaagtatcaacagctggttaatgataatggacaattatttatgattggaagtgatacacttccctataacgctgaacaacttgtcttatcaaaagaatcagtacaaactatcaataatccaggtatcaaagatgaaggtagtgatgaagaatcagaaaataaaaaattggataatgtatacgatgagattgttttatgtatgaataaatattttccgttatatgacaatagagggttcagaaatagtataacaaatgggaaaaacaagtttttaaaattgccaatcaaaaacatttataaaaatggcaaattaataaatgttgggaaaagagaagttattaatagaatcttacagggactacatgccaatgcttcagttacagatttgtcaaatttgggaattaaatctccatttggatttctacaaaaaggagctggtctttctcttagtggagaggcccagcttatccatcagtcggcaaccggattatttgaacatcgggttcaactaaacaaaattaagtaa

SEQ ID NO: 361 - DNA, 4125 bp, Pediococcus lolii DSM 19927
tcgggggaaaaacgatatagtgagattaataacgttgaggaggaattttatatgggtgacagaaagtataaccttggtctcgatatcgggacgtcatcaattggctttgcggcagttgacgaaaataaccaacccattcgagtcaaaggaaagacggcaattggggtacgtctctttgaagagggcaaaacggcggcggatcggcgtggttttcggactacgcggcggagattatcccggcgccggtggcggatcaatttattgaacggaatttttgatgcgcaccttgccgaggtggaccccacctttttggcccggttaaaagaatcgaaccggtcaaatttggatccaaagaagtcttttcaaggctcacttttattcccagaacggaaagattatcaattctacaaggaatatcccacgatttaccatttgcgaaaggcattgatggaaaaagaccggaagtttgatattcgggaaatttatttagcagtccatcacattattaaatatcggggaaacttcttaaacggaacgccgatgcggtcgtttaaagtagaaaatattgagcttgatacgttatttgaccggttaaaccagctttatgaagagattattcccgacaatgaactggcctttgatttagaacaagtggcggatgttaaggaagttcttagtagcacaactatctataaaatggataagaaaaaacaactagtgaagatgatgctgcttcccgcaagcaacaaggcattacagagtgaaaacaagaaaatcgttacgcagtttgttaatgcgattttgaactataagtttaagcttgacgtgctcctccaagttgaaacggacgcggattggtccttgaagttaaacgacgagggggcggatgataaattagaagaattcacgggtgatttagatgaaaatcgtttggaaattattgatcttttgcaaagactacataactggttttcattaaatgaaattacaaaagatggtaattcgttgtccgcggcgatggttgaaaaatataaagaccaccgtcaccatttagaattattgaaaaaggtaattgaggatcattcagatgccaagaaagcaaaagcactgaaggaaacgtacacggcctacgtcggtaaaacggacgataagacccagaacaaagatgatttctataaggctgtggaaaagaacttagatgattcgccggaagcaaaagaaattaaacgtttaattcagctagaccagttcatgcctaagcaacggactgggcaaaatggggcaatccctcaccaactgcatcaacaggagctcgaccaaattatcgaaaagcaatctaaatattatccgtttttggcggagccgaatccgaacgttaagcgccgtaaagatgctccttacaaactagacgaattgattgcctttaagatcccgtactacgtgggcccattggtaacgccggaagaacaagcacaaaataaagaaaacgtgtttgcgtggatgaagcggaaggctgccggtccaattacaccatggaattttgatgaaaaagttgaccggatggaatccgcaaaccgatttattcggcggatgactaccaaagatacgtatctttttggcgaagatgtcttacctgcggaaagcatgatttacgaaaaatttgtggtgcttaatgagctaaataatttgaaaattaatgggcggcatttatcgcttaaggataagcaagacatttataatgacttgttcaagcaacaaaaaacggtttccattaaagcgctccaaaattactacgttaccaaaaagaaggctgcaaccgcgcctaccgtgggcggattggccgatccaaagaaatttttatcaagtctatcaacttatattgatttcaaaaatatgtttggggagcgggtaaacgatccgcaattccaagaggatttggaacaaatcgtggaatggtcgacaatttttgaagatcggggaatcttcaaggcaaaattacaagccctgggttggctatctgaaaagcagattcaacaactggtggctaaacgttacaaaggatggggccggctttccaagaagctcttaactgggctaaagaacgcggaaggatactcaattttagacgaaatgtggcattcgaccgaaaacttcatgcaaattcaaactcgcccagaatttgcggcactaattcaacaggccaacgaaaagcaatttgagggcaacgacccggataatgtttgggagaatattgaaaacattttgggggatgcgtacacttcaccacaaaataagaaggcaatccgtcaagtggtgaaggttgtccaagatattgaaaaagcagtgggtaacccacctgaaaaaattgcgattgagtttacccgtgaagccgcggcgaaccctcaacggacgcaaagccgtttgcggaccttggaaaaactttatgaaagtgccgaagaagttgtagacgcggggttaactgccgaactagctgaatttaaggaaaataagcacgttttatcggataagtactacctgtactttacccaattaggccgggatgtttatactggggacactattagtctagataggttgaacgattacgatgttgaccacattttgccacaatcctttattaaggatgatagtttggacaaccgggtattgacgattcgagcggttaacaacggaaaaagtgataacgtaccagctaaaatgtttggcaaaaaaatgggttcgttttggcggtacttgctggataacgggatgatttccaaacgaaaatataataacttaattaccgatccggataatatcagtaaatacgcccaaaagggatttattaaccggcaactcgtggaaaccagtcaagttatcaaactgacggctaacattttaaacgggatttacgataaggacaccgaaattatcgaagttccagcgaaaatgaattctcaaatgcggaaaatgtttgatttggttaaggtgcgggaagttaacgactaccaccatgcctttgacgcttatttaactatctttattggaaactatctgtataaatgttatccaaaattacggccatactttgtttatgataattttaaaaagtttggtaacaaggaagatataggacataaacgttttaactttttaggaaaaattgagcgagacaagaaagtggttgctcctgaaactggtgaaatcttgtggtcaaacgtggcaccgaatgagaccatcaagcagattaagaaggtttatgattataaatttatgcttacttctcatgaaacttacactaaacacggtgcgttgtttaatcaaacgatatactctgccaaagcttcaaaaacgatgattccaattaaaaatgaccgacctaccaaactttacggtgggtatagcgggaatgaagatgcatatatgagcattattaggttaagtgacaagaaaaaaacgtacaaagtagttggtatatcaatgcgcgatgctagtaagttgaaagcttatgaaaataatgcgcatgaagaatatctaaaaaaattaaaggaagttattgaacagcaatttttagatagtggcaaaaaaactaaagccgattttgaaattgttattccaaaagttaattatcatcaaagaatgcaggatggcacaaagcaatttagaattggcagttccaaatatgtacacaacactaagcagttagtattatctgagaaaactctaaaagccattcgaaacaataagcaatataacggagatgctgaaaaggatcttattaatgcttttgatgaaatactaactattgttaatgattcgttcagtatttttgatattagaagttttagaaaaaagcttaatgaaagtcgagataagtttgtttctttaccagtagaagatacaaaagaaaaaagcaaagttattaaaggcaagcgggagacgttgaagcagatattgattgcacttcatgcaaacggcacttcacaagacatcccacaactagggcttaaaagttttggaaaaatggttaaaactggggggcttacattatcagaaaatacagccctaattcatcaatcgccatcaggattattcgaacataaaattaaattaagcgatctttaa

SEQ ID NO: 362 - DNA, 4074 bp, Pediococcus parvulus DSM 20332A
atgggtgacagaaagtataaccttggtctcgatatcgggacgtcatcaattggctttgcggcagttgacgaaaataaccaacccattcgagtcaaaggaaagacggcaattggggtacgtctctttgaagagggcaaaacggcggcggatcggcgtggttttcggactacgcggcggagattatcccggcgccggtggcggatcaatttattgaacggaatttttgatgcgcaccttgccgaggtggaccccacctttttggcccggttaaaagaatcgaaccggtcaaatttggatccaaagaagtcttttcaaggctcacttttattcccagaacggaaagattatcaattctacaaggaatatcccacgatttaccatttgcgaaaggcattgatggaaaaagaccggaagtttgatattcgggaaatttatttagcagtccatcacattattaaatatcggggaaacttcttaaacggaacgccgatgcggtcgtttaaagtagaaaatattgagcttgatacgttatttgaccggttaaaccagctttatgaagagattattcccgacaatgaactggcctttgatttagaacaagtggcggatgttaaggaagttcttagtagcacaactatctataaaatggataagaaaaaacaactagtgaagatgatgctgcttcccgcaagcaacaaggcattacagagtgaaaacaagaaaatcgttacgcagtttgttaatgcgattttgaactataagtttaagcttgacgtgctcctccaagttgaaacggacgcggattggtccttgaagttaaacgacgagggggcggatgataaattagaagaattcacgggtgatttagatgaaaatcgtttggaaattattgatcttttgcaaagactacataactggttttcattaaatgaaattacaaaagatggtaattcgttgtccgcggcgatggttgaaaaatataaagaccaccgtcaccatttagaattattgaaaaaggtaattgaggatcattcagatgccaagaaagcaaaagcactgaaggaaacgtacacggcctacgtcggtaaaacggacgataagacccagaacaaagatgatttctataaggctgtggaaaagaacttagatgattcgccggaagcaaaagaaattaaacgtttaattcagctagaccagttcatgcctaagcaacggactgggcaaaatggggcaatccctcaccaactgcatcaacaggagctcgaccaaattatcgaaaagcaatctaaatattatccgtttttggcggagccgaatccgaacgttaagcgccgtaaagatgctccttacaaactagacgaattgattgcctttaagatcccgtactacgtgggcccattggtaacgccggaagaacaagcacaaaataaagaaaacgtgtttgcgtggatgaagcggaaggctgccggtccaattacaccatggaattttgatgaaaaagttgaccggatggaatccgcaaaccgatttattcggcggatgactaccaaagatacgtatctttttggcgaagatgtcttacctgcggaaagcatgatttacgaaaaatttgtggtgcttaatgagctaaataatttgaaaattaatgggcggcatttatcgcttaaggataagcaagacatttataatgacttgttcaagcaacaaaaaacggtttccattaaagcgctccaaaattactacgttaccaaaaagaaggctgcaaccgcgcctaccgtgggcggattggccgatccaaagaaatttttatcaagtctatcaacttatattgatttcaaaaatatgtttggggagcgggtaaacgatccgcaattccaagaggatttggaacaaatcgtggaatggtcgacaatttttgaagatcggggaatcttcaaggcaaaattacaagccctgggttggctatctgaaaagcagattcaacaactggtggctaaacgttacaaaggatggggccggctttccaagaagctcttaactgggctaaagaacgcggaaggatactcaattttagacgaaatgtggcattcgaccgaaaacttcatgcaaattcaaactcgcccagaatttgcggcactaattcaacaggccaacgaaaagcaatttgagggcaacgacccggataatgtttgggagaatattgaaaacattttgggggatgcgtacacttcaccacaaaataagaaggcaatccgtcaagtggtgaaggttgtccaagatattgaaaaagcagtgggtaacccacctgaaaaaattgcgattgagtttacccgtgaagccgcggcgaaccctcaacggacgcaaagccgtttgcggaccttggaaaaactttatgaaagtgccgaagaagttgtagacgcggggttaactgccgaactagctgaatttaaggaaaataagcacgttttatcggataagtactacctgtactttacccaattaggccgggatgtttatactggggacactattagtctagataggttgaacgattacgatgttgaccacattttgccacaatcctttattaaggatgatagtttggacaaccgggtattgacgattcgagcggttaacaacggaaaaagtgataacgtaccagctaaaatgtttggcaaaaaaatgggttcgttttggcggtacttgctggataacgggatgatttccaaacgaaaatataataacttaattaccgatccggataatatcagtaaatacgcccaaaagggatttattaaccggcaactcgtggaaaccagtcaagttatcaaactgacggctaacattttaaacgggatttacgataaggacaccgaaattatcgaagttccagcgaaaatgaattctcaaatgcggaaaatgtttgatttggttaaggtgcgggaagttaacgactaccaccatgcctttgacgcttatttaactatctttattggaaactatctgtataaatgttatccaaaattacggccatactttgtttatgataattttaaaaagtttggtaacaaggaagatataggacataaacgttttaactttttaggaaaaattgagcgagacaagaaagtggttgctcctgaaactggtgaaatcttgtggtcaaacgtggcaccgaatgagaccatcaagcagattaagaaggtttatgattataaatttatgcttacttctcatgaaacttacactaaacacggtgcgttgtttaatcaaacgatatactctgccaaagcttcaaaaacgatgattccaattaaaaatgaccgacctaccaaactttacggtgggtatagcgggaatgaagatgcatatatgagcattattaggttaagtgacaagaaaaaaacgtacaaagtagttggtatatcaatgcgcgatgctagtaagttgaaagcttatgaaaataatgcgcatgaagaatatctaaaaaaattaaaggaagttattgaacagcaatttttagatagtggcaaaaaaactaaagccgattttgaaattgttattccaaaagttaattatcatcaaagaatgcaggatggcacaaagcaatttagaattggcagttccaaatatgtacacaacactaagcagttagtattatctgagaaaactctaaaagccattcgaaacaataagcaatataacggagatgctgaaaaggatcttattaatgcttttgatgaaatactaactattgttaatgattcgttcagtatttttgatattagaagttttagaaaaaagcttaatgaaagtcgagataagtttgtttctttaccagtagaagatacaaaagaaaaaagcaaagttattaaaggcaagcgggagacgttgaagcagatattgattgcacttcatgcaaacggcacttcacaagacatcccacaactagggcttaaaagttttggaaaaatggttaaaactggggggcttacattatcagaaaatacagccctaattcatcaatcgccatcaggattattcgaacataaaattaaattaagcgatctttaa

SEQ ID NO: 363 - DNA, 4128 bp, Pediococcus parvulus DSM 20332B
atggaaaataagaaatatagtatcggcctagatatcggaaccagttcaattggttttgcagtcgtggatgaaaataaccgtgtcatgcgcgtgaaaggaaaaaatgcaattggtgtgcgtttattttctgaagggcaaccagctgcggatcgacgtagtttcagaacaacacgccgtcgcttaagtcgccgtcgttggcgtttacgattattgcgggagatttttgaaccgtacataaatcctgtggatgaagcattctttatgcgattgaaagaatcaaatttgtcaccgaaggatgctaacaagcactactcaggagatattttgtttaacgatcaatcggatcaaaaattttatgaaaagtatcctacaatctatcatttacgtcatgcgctcatgacagaacatcgtaaatttgatgttcgtgagatttatttggcgatccatcatattgtgaagtttcgtgggcattttttaaatgcagcttctgccagtaattttactgttggtaaattgaatttggagggcaaatttgatgctctaaatgaaatttatcaacgcgttttaactgatgatccgtttgcacttagaacggataatttggatcatatcaaagaaatattgattgataacaagcggagtaaggctgatcggcaacgaactttgactggggatgtgtatcaaagttctgaagaaaaagaaattgaaaaacgtaacaaagccattgcaaccgaaatcctgaaagctgcagttggtaataaagccaaattaaatgtgattaccaacgttgaagttgacaaggaagccgctaaagattggtccttaacatttgattcagaaacgattgatgatgaattggccaaggttgatggtcagatgacagacgatggccgtgaaattattgaaattttgcgtagtctatactccgggatcactttggcggcaattgtgccagaaaatcatactttatcacaatcaatggtagaaaaatataattcgcataaggcacatttgaaattattgaaagatttgattaataatatgactgatacgaggaaagctaagaatcttcgtgctgcatatgacggctatattgatggtgtaaagggaaaagttttaactagggatgatttctataaacaaattcaaggtaacttggatgattcagccgaagcacagaaaattcaagatgtgatggatcaagatgaatttatgcctaagcaacgcaccaaagcgaatggttcaattccgcatcaactgcaacaacaggagctggatcagatcgttgaaaatcaaaaggaatactatccttggttagctgaggaaaatccaaatgagacacgccgcggggttgctaaatataagttggatgagttggtcactttccgtgtgccttattatgttggcccaatgattactgccgaagatcaggaaaaacagtctggtgctagttttgcatggatgaaacgaaaagaaccaggaaatattacaccttggaacttcgatcaaaaagtggaccggatggctagtgcaaaccagtttatcaaacggatgacaactactgatacctatttattgggtgaagatgtgctaccggcacagagtttgttatatcaaagatttgaagtgttaaacgaactcaataaaattcgaattgatcgtaagccaatttcgatcgaactcaagcaacagatttttaatgatttgtttaaaaagtttaaaaatgtcacgattaagcatttgcaggagtatttagtagctactggtggctatgataaacgcccgagaattgacggtttagctgatgaaaaacgatttaatagtggactaagtgcttatcatgatttgcatggaattttgggtgcagaggttgttgatgccaatgataaacaagacgatttggaaaagattattgagtggtcgacaatttttgaagataaaaagatttaccgggccaaactagatgagttgacttggctaacggatagtcaaaaagaaaaattagcgactaaacgttatcaaggttggggtcgcttatcaaagaaactacttagtggtctaagaaactcggatcatcgtagtattttagacattttgtggattacgaacgaaaactttatgcaaattcaagcagatccagatttcgctgaacttgtaaaaaatgctaatcaagggatgcttggcaagaataattcacaggatgttattaacgatttatatacttctccacaaaacaaaaaagcaattcgacaaattttattagttgttcatgatatccaaaacgcgatgcatgggcaagcacccgctaaaattcatgtagaatttgcgcgtggagaggaacgtaaccctcgacgttccattcaacgtcagcatcagattgaagcagcatatgataaagtgaccagtgacctcttggtagacgccggtgttcgtcaagagctaaaagatgccattaacgataaacgagattttaaagatcgattattcctgtacttcatgcagggaggtcgtgatatttataatggcgaaccaattaatatagatcgcctttcaagctatgatattgatcatattttgccacaggcctttgttaaggatgattcattaaataatcgtgtgttaactgatgctgagggaaacagacgaaaatcggatgccgttcctagtgagctttttggtgctaagatgcgatcaacctgggaattaatgagagaacaggggttaatttcaaaagctaagtatcgaaatttaaccatgaatcctgagaatattaatgcccatactgaaaatggctttatcaatcggcaattggttgaaactcgacaggtaattaagttagctgttaatattttggctgatgaatatacagaagatacccaaattgtttcagtaaaggcggacctttcccatcagatgcgtgaagactttgaattactgaaaaatcgggatgtgaatgattatcaccatgcgtttgatgcctatttagcggcgtttattggcaactacttgttggaacgttatcctaagttgcagtcatactttgtttatggagatttcaagaagtttagtcaaaaagatacaaagatgagacggtttaactttatctacgatttgaaacatagtgatcagattgcagataagaatggtaaaaaaatatggcacaaaacgaatgatcttgattacattcgtcacttgtttgcatacaaaaagattctgatttcgcatgaagtgagtgaacggcgtggggcactttataatcaaaccgtgtataaagccagtgatgataaggctagtggacaaggttctaagaaattaatcccaattaaagctaataaaccgaccgaaatttatggtggatatactggtaaaacacttgcctacatggcgattgttaaagtgatcaagggtaagaaaattgcatataaagttgtgggggtaccgacttctgctttagttcaattagcaggtattgaacatggatctcaagaggaactaaatcggttatatgacgtacttaaacctcaatttacccaactgaagaaaaacaacaaaactggtgagatttctgaaactgtaagtaaatttgaaatcgttattcctagggtgaagtaccagcagttagtcgaagacgatgataaattgtttatgatcgggagtgatacgtacccgtataatgcacaacaattagtgttgtcagaaggtgcacttaaagtgataaataatgtttatcgaaagggagaaaacagtgataaacaagaaagttataaattggacgatgtgtatgatgaaattataattgccatgaaaaaatattttccactatatgataatcgtggctttagagaaaaagttgcggaaggtaaatcaacatttgaaaatttaccaatatcaaatgaatttaagaatggaaaactaactaaaatagggaaaaaagaggttatcaacaggatgttacagggattacacgctaatgcaacaatgacagatttgaagattttaggtattaaatctccatttggatttatgcaacagccaacaggtattgcattaagtgagaatgctcaactaatttatcagtcgccaacagatttatttgaacggcgagtacaattgaataaaattaagtaa

SEQ ID NO: 364 - DNA, 4146 bp, Pediococcus stilesii DSM 18001
tccgatatagtgagaattgataacggattggaggaattaaaagtgaacaacagaatttataacattggtctcgatatcgggacatcgtcggtcggttttgccgttacagatgctcaagacaaattggttcgagtgaaggggaaaacggcaattggcgtacgtctttttgaagaaggacataccgcagctgaacgccgtggatttcgaacaactcggcggagactatcacgccgaaaatggcggattaatttgttaaaccaaatttttgagccatacatatcagagattgatccaactttttttgcgcgtttaaagaattcaagtttagcgggaaaagataaaaaattcgaaggatcattattatttccggatcgaacggactatcagttttataaagataacccaacaatgtatcatttacgcaagcacttaatggagaaagatcgtcaatttgatctacgtgaaatttatttagcgatgcatcatataattaaatatcgggggaattttctgaatacgaccccaatgaatcattttaaaaatgaagaaattgactttagtgcacttttttcaagactaaacgaattgtatcaggaaattgacgatgaaaatatttttgaactgaacattgaaaatgtcgatgaaattaagaagatccttttaaatcatgatctttttaagatggaaaaacaaaaacaagtcgctaaattactgaacgttgataccgatgataaacaattgaaaaaagaaaataccgctttggcaagtaattttagcaaggcgattttgggatataaatttaatttagcgttagtgacaaaaattcctgatcaagataaaaaagaatggacgattagcttaggggatgaagattttgatgatcgcttggacaatgtgcctgtagccttgactgaaagccaacttgaagtggttgaagttttacattcaatttttaacagtatctcattgaatgaaattgttgaaaacggagaaacattatcttctgcaatggttaggaagtataacgatcacaagcacgacttaaaattgttgaagaacgtgatgaccactttagaagatcggaaaaaagctaaaaaaattcaaggaatttataatgtctttgttggtaaagacacggaccttatttcggataaagataagaataaatataaggataaagatgagttttataaagaaattcaaaaaaatcttgataattctagtgatgcagaagaaattattaaacgaattaaacaagatcaatttcttccaaaacagcgaacatctaaaaatggagttatcccacaccaattgcatcaacgagaattagatttgatcattgaaaaccaagcaaaatattatccttttttaaaggaagcaaatccaaacaagaagcgattaaagcaggcaaaatataaattagacgaattaatcgcgtttaaaattccttattatatagggcctacatcgggtgctgaaaattctgatttttcgtggttaaaacgaaaaaaagatgggcagattactccttggaactttgacgaaaaggttgaccgcatcgagtccgcaaaccgatttatccgacgcatgactaccaaagatacatacttattagctgaggatgttttaccacttgaaagcctaatttacgaaaaatatagtgttttaaacgaattaaacaacgttcggatcaacagacagaagttgagcgttaatgataaacaagatatttataatgaactgtttaagaatagtaaaacggtcaccctaaaacagttacaaaaatattttgaagtaaccaagaagttaaaaacggtggtagtagagggattggccgatcctaaaaaatttctttcaaatttaggaacgtatcatgattttaaactaatatttggtgacatcgttgatgatccagaatatcaaacggatcttgaaaacattatcgaatggtcgacgatctttgaagaccgtggaatttttaatagcaaattaaacgaaattacttggcttactgatgagcaaagaaaaaaagttttatctaaacgttatcaagggtggggtcgattctctaaaaagctgttagttgggttaaagaattcgcaaggaaactcaattttagacgagctttggaatacgaaccttaatttcatgcagctacagagtcaagacgattttgccgaattaattcatgcagaaaatgcaaaacaatttaaagcaaacgatcccgataatccttggaatggaattgatgccattttaaacgacgcctatacttcaccacagaataaaaaagcaatccgacaagttgtgaaggttgttcaggatatcgaaaaggcaatgggaaacaaacctcagaaaattgcaattgaatttacacgctcggctgataaaaatcctcgaagaacggatagtcgaattaagcggctgtctgatatatataaagaggcggccgagaaagttgtcggtgaatctttaaagttagagttaaatgaatatttaacttctaagaaaaaaatgacggataaaatgtatctttattttactcagttgggaacggatatttatacgggaaagaagattgacattgatcagttaaataattacgatatcgaccatgttttgccacagtcatttttaaaagatgactccttggacaatcgagtcttaacaaacagaagtgataatagtgagaagagcgatacagttccgctgcataaatttggcgcaaagatgggtaatttttggcggcaacttgctgatgaaggattgattaccaaacgaaagtacaagaacttgactaccgacccagccacaattgataaatacacaatacaagggtttatcaggcgtcaattggtggaaacaagccaagttattaagctgaccgcgaatattctgggaggattatatccagaagaaacagaaattttagaaatacctgccaaactaaaccaccagttccgggatatgtttgatttagtgaaggtgcgggaagtaaatgattaccatcatgcttttgatgcttatataacagtatttgtcggaaattttctttacagaagatatcctaaattaaggtcgtactttgtatatggtgactttaaaaaattaaataaaaccgatgacgatattcgaaagtttaattttttgaatttatttaataaagataaagttgaggataatgaaacggacgaaatcctttggtctaaagcggaatcgataagggacattaagaacatttataattacaagtttatgttagtttcgagggaagtttacactaggcacggggcaatgttcaatcagacaatctatcccgcctcgaaaaatgattcaaaaaaattaattccaattaaaaagggcaaggatactgcaatttatggcggatacagtggaaatactgacgcctatatggcaatcgttgctgttgaagacaaaaagggcgagaaattcaaagtggtcggcgttccgacacgggcggttagccgattagaacaattagcagccgatgatcacgatcagtatcttacggcactccatgatgtgttgaagccaaatttcacgaagattaaaacaaatcgaaaaactaaagcgaaggaagaagtgacaacaccattccgaattttagttggaaaagttggttatcgtcaattaattcaagatggtcaggtaaaaatgatgctgggaagctcagcttataaatataatgctaaacaattggtgctttcggaaaaatctttaaaagttattaaaaacaataaaaagtataatcctgatgatgaaaatcaagatttaattgatgtttacgatgagatattgggagtggttaatcgagcgtttaatttatatgacacgaacggctttagaaagaaattgaatgataatagagtgaagtttgttgaattaccaatcaataatatatttgatggtacaaaattagttcaaatgggtaaaagagcggttttgacgcaaattttaaatggcttacacgcaaatgcggcgcttggtgatctgaaggctttgggtatctcaacgccgtttggaaagatgcagagcaaaagtggtattccattatcgatggacgcttctttggtttatcaatcaccaactggactttttgaaagaaaactaaatttaagcgatctt

SEQ ID NO: 365 - DNA, 4113 bp, Steptococcus agalactiae GB00300
atgaataagccgtattcaataggccttgacatcggtactaattccgtcggatggagcattattacagatgattataaagtacctgctaagaagataagagttttagggaacactgataaagaatatattaagaagaatctcataggtgctctgctttttgatggtgggaatactgctgcagatagacgattgaagcgaacagctcgtcgtcgttatacacgtcgtagaaatcgtattctatatttacaagaaatttttgcagaggaaatgagtaaagttgatgatagtttctttcatcgattagaggattcttttctagttgaggaagataagagagggagcaagtatcctatctttgcaacattgcaggaagagaaatattatcatgaaaagttcccaacgatttatcacttgagaaaagaattggctgacaagaaagaaaaagcagaccttcgtcttgtttatctggctctagctcatatcattaaattcagagggcatttcctaattgaggatgatagatttgatgtcaggaatactgatattcaaaaacaatatcaagcttttttagaaatctttgatacaacttttgaaaataatgatttgttatctcaagatgtagacgtagaggcaattctaacagataaaattagcaagtctgcgaagaaagatcgtattttagcgcagtatcctaaccaaaaatctactggtatttttgcagaatttttgaaattgattgtcggaaatcaagctgacttcaagaaacatttcaatttggaggataaaacgccgcttcaattcgctaaggatagctacgatgaagatttagaaaatcttcttggacagattggtgatgaatttgcagacttattctcagcagcgaaaaagctatatgatagtgttcttttatctggcattcttacagtaacagatctcagtaccaaggcgccactttctgcctctatgattcagcgttacgatgaacatagagaggacttgaaacagttaaaacaattcgtaaaagcttcattgccggagaaatatcaagaaatagttgctgattcatcaaaagatggctacgctggttatattgaaggcaaaactaatcaagaagcattttataaatacttgtcaaaattgttgaccaagcaagaaggtagcgagtattttcttgaaaaaatcaagaatgaagattttttgagaaaacaaaggacctttgataatggctcaattccacaccaagtccatttgacagaattgagggctattattcgacgtcaatcagaatactatccattcttgaaagagaatctagataggattgaaaaaatccttacctttagaattccttattatgtcgggccactagcacgtgagaagagtgattttgcatggatgactcgcaaaacagatgacagtattcgaccttggaattttgaagatttggttgataaagaaaaatctgcggaagcttttatccatcgtatgaccaacaatgacctctatcttccagaagaaaaagttttaccaaagcatagtcttatttatgaaaaatttactgtttacaatgaattaacgaaggttagatttttggcagaaggctttaaagattttcaatttttaaataggaagcaaaaagaaactatctttaacagcttgtttaaggaaaaacgtaaagtaactgaaaaggatattattagttttttgaataaagttgatggatacgaaggaattgcaatcaaaggaattgagaaacagtttaacgctagcctttcaacctatcatgatcttaaaaaaatacttggcaaggatttccttgataatacagataacgagcttattttggaagatatcgtccaaactctaaccttatttgaagatagagaaatgattaagaagcgtcttgacatctataaagatttttttacagagtcacagcttaaaaagctctatcgccgtcactatactggctggggacgattgtctgctaagctaataaatggcatccgaaataaagagaatcaaaaaacaatcttggactatcttattgatgatggaagtgcaaaccgaaacttcatgcagttgataaaagatgctggtctatcatttaaaccaattattgacaaggcacgaactggtagtcattcggataatctgaaagaagttataggtgaacttgctggtagccctgctattaaaaaagggattctacaaagtttgaaaatagttgatgagctggttaaagtcatgggctatgaacctgaacaaatcgtggttgaaatggcacgtgagaaccaaacgacagcaaaaggattgagtcgttcacgacaacgcttgacaaccttaagagaatctcttgctaatttgaagagtaatattttggaagagaaaaagcctaagtatgtgaaagatcaagttgaaaatcatcatttgtctgatgaccgtcttttcctatattaccttcaaaatggtaaggatatgtatactgatgatgagcttgatattgataatttaagtcaatatgatattgaccacattattcctcaagctttcataaaagatgattctattgataatcgtgttttggtatcatctgctaaaaatcgtggaaagtcagatgatgttcctagccttgaaattgtaaaagattgtaaagttttctggaaaaaattacttgatgctaagttaatgagtcagcgtaagtatgataatttgactaaggcagagcgcggaggcctaacttccgatgataaggcaagatttatccaacgtcagttggttgagacacgacaaattaccaagcatgttgcccgtatcttggatgaacgctttaataatgagcttgatagtaaaggtagaaggatccgcaaagttaaaattgtaaccttgaagtcaaatttggtttcaaatttccgaaaagaatttgtattctataaaattcgtgaagttaacaattatcaccatgcacatgatgcctatcttaatgcagtagttgctaaagctattctaaccaaatatcctcagttagagccagaatttgtctacggtgactatccaaaatataacagttacaaaacgcgtaaatccgctacagaaaagctatttttctattcaaatattatgaacttctttaaaactaaggtaactttggcggatggaaccgttgttgtaaaagatgatattgaagttaataatgatacgggtgaaattgtttgggataagaagaaacattttgcgacagttagaaaagtcttgtcataccctcaggtcaatatcgtgaagaagacagagattcagacaggtggtttctctaaggaatcaatcttggcgcatggtaactcagataagttgattccaagaaaaacgaaggatatttatttagatcctaagaaatatggaggttttgatagtccgatagtagcttactctgttttagttgtagctgatatcaaaaagggtaaagcacaaaaactaaaaacagttacggaacttttaggaattaccatcatggagaggtccagatttgagaaaaatccatcagctttccttgaatcaaaaggctatttaaatattaggactgataaactaattattttgcccaagtatagtctgttcgaattagaaaatgggcgtcgtcgattacttgctagtgctggtgaattacaaaaaggtaatgagctagccttaccaacacaatttatgaagttcttataccttgcaagtcgttataatgagtcaaaaggtaaaccagaggagattgagaagaaacaagaatttgtaaatcaacatgtctcttatttcgacgatatttttcaaataatcaatgatttttcaaaacgagttattctagcagatgctaatttagagaaaatcaataggctttaccaggataataaggaaaatataccagtagatgaacttgctaataatattatcaatctatttacttttaccagtctaggagctccagcagcttttaaattttttgataaaatagttgatagaaaacgctatacttcaactaaagaagtacttaattctaccctaattcatcaatctattactggactttatgaaacacgtattgatttgggtaagttaggagaagattga

SEQ ID NO: 366 - DNA, 4113 bp, Steptococcus gallolyticus ATCC BAA-2069
atgactaagaaaaattattcaatcggacttgacataggtactaatagcgtaggttgggctgtgattactgatgattacaaagttccagctaaaaagatgaaagttttaggaaatactgataaaaagtatatcaagaaaaacttactaggtgcattgttatttgacagtggcgaaacagctgaagcgactcgtttgaaacgtactgctcgtcgtcgttacacacgccgtaaaaatcgtttgcgttacctacaagaaatttttgcggaagaaatgactaaagttgacgaaagcttcttttatcgtcttgacgaatcatttttgacaacagatgaaaaagattttgaacgtcatccaatttttggcaataaagcagaagaagatgcctatcatcagaaattccctacaatttaccatttaagaaactatcttgcagattcatctgaaaaagcagatttacgtttggtttatctagctttggcacacatgattaaatatcgtggacatttcttaattgagggaaaattgaatgccgaaaatacagatgttcaaaaactatttactgatttcgtaggagtgtatgatagaacatttgatgatagtcacttatcagaaattacggttgatgttgcaagtactttgacagaaaaaattagcaaatcacgtcgtttagagaatcttattaaatactacccaacagaaaagaaaaatactttatttggaaatcttattgctttggctttaggattacagcctaattttaaaatgaatttcaaattatctgaagatgctaaattgcaattttctaaagatacctacgaagaagatttagaagagttacttgggaaaattggagacgattatgcagatttatttacttcagctaaaaatctttatgatgcaatcttactttcaggtatcttaactgttgatgataattcaactaaagctcctttatcagcttcgatgattaaacgttatgttgaacaccatgaagatttagaaaagctaaaagaattcattaaggcaaataaatctgagttgtatcacgatatttttaaagataaaaacaaaaatggttatgcgggctatattgaaaatggtgtcaagcaggatgaattctataaatatttaaaaaatactctctctaaaattgatggaagtgattatttcctagataaaattgaacgtgaagatttcttaagaaaacaaagaacatttgataatggttcgattccgcaccaaattcatctccaagaaatgcatgcaattttgcgccgtcaaggtgattattacccatttctaaaagagaagcaagatagaattgaaaaaatcttgacttttagaatcccttactatgtcggaccattagtgcgaaaagatagccgatttgcatgggcagaatatcgttcggatgagaagattacaccgtggaatttcgataaggtaatcgataaagaaaaatcagctgaaaaattcattacacgcatgactttaaatgatttgtatttaccagaagagaaagttctaccaaaacacagtcatgtatatgaaacatatgcggtttataatgaattaaccaaaattaagtatgtcaatgagcaaggaaaagaatctttctttgattcaaatatgaaacaagaaatctttgaccatgtctttaaagaaaatcgtaaagttaccaaggaaaaacttttaaattaccttaataaagaatttcctgaatatcgtattaaagatttaattggacttgataaagaaaataaatctttcaatgctagtcttggaacttaccatgatttgaaaaagattttggataaagctttcttggatgataaagtaaatgaagaagttattgaagatattattaaaacgttaactttgtttgaagataaagatatgatccatgaacgtcttcaaaaatatagtgacatttttacagctaatcaattgaaaaaacttgaacgacgtcattatactggttggggacgtttgtcatataaattaattaacggtatccgtaataaagaaaataataagaccattcttgattatctgattgatgatggttctgctaatcgtaactttatgcagttaattaacgatgatacattaccatttaaacaaatcatccaaaaatcgcaagttgttggtgatgtcgatgatattgaagctgttgttcatgatttacctggaagtcctgctattaaaaaaggtattctacaaagtgtcaaaatcgttgatgagctagttaaagtgatgggagataatcctgataatattgttattgaaatggcgcgtgaaaatcaaacaactaatagaggaagaagccagtcccaacaacgtttgaaaaaacttcagagctcattaaaagagttaggaagtaatattcttaatgaggaaaaaccgtcatatattgaagataaggttgaaaatagtcatcttcaaaatgatcaactcttcctttactacattcaaaatggtaaagatatgtacactggtgatgagttagatattgaccatctaagcgattatgatattgaccacattattcctcaagcctttattaaggatgactctattgataatcgagtactaacaagttctgctaaaaatcgaggtaaatcagatgatgtaccaagtcttgatattgttcgtgctagaaaggcagaatgggttcgattgtataaatcaggactaatctctaaacgtaaatttgataatttaacgaaagccgaacgtggtggattgactgaagcggataaggctggatttattaaacgtcaattggttgaaacacgtcaaatcacaaaacatgtggcacaaattttagatgctcgttttaatacagaacatgatgaaaatgacaaggtgattcgtgatgtgaaagtcattactttaaaatcaaatctggtttcacaattccgaaaagattttgaattttacaaagttcgtgagatcaatgattatcatcatgctcatgatgcttatcttaatgcggttgttggaacagcattattgaaaaaatatcctaaattagcttctgaatttgtttatggtgagtacaagaaatatgatattcgtaaatttatcactaattcaagcgataaagcaacagcgaaatatttcttctattcaaatttgatgaatttctttaaaactaaggttaaatatgcggatggtactgtctttgaacgacctattatcgagacaaatgctgacggtgaaattgcttggaataagcaaattgactttgaaaaagttcgaaaagttttatcctacccacaagtcaatattgttaaaaaggttgaaactcagacgggaggattctcaaaagaatcaattttacctaaaggtgactctgataaattaattccacgaaagacaaaaaaagtttattgggatactaaaaaatatggtggttttgatagtccaacagtagcttattctgtttttgttgtagctgacgtcgaaaaaggtaaagctaagaaattgaaaactgtaaaagagctagttggtatttctatcatggaacgttctttctttgaagaaaatccagttgaattcttagaaaataaaggatatcacaatattcgagaagataaattaataaaacttccaaaatacagtctttttgaatttgaaggtggaagaagacgcttgttagctagtgcttcagaacttcaaaaaggaaatgaaatggtgcttccaggatatttagtagaattgctttatcatgctcatcgagctgataattttaatagcactgaatatttaaattatgttagtgagcataagaaagaatttgaaaaagttttatcttgtgtggaagactttgctaacttatatgttgatgttgaaaaaaatttaagtaaaattagagcagttgcagatagtatggataacttctcaattgaggaaatttcaaattcatttattaatttattaacactgactgcattaggtgcgccggctgatttcaatttccttggtgaaaaaattccacgtaaacgctatacctcaacaaaggaatgcctgactgccacccttatccaccaatctatcactggtctttatgaaacacgtattgatttgagtaaattaggagaagagtaa

SEQ ID NO: 367 - DNA, 3387 bp, Steptococcus mutans NLML5
atggctaatagtaaaattttaggtttggatattggcattgcttccgtaggtgttggaattattgataaggaaacgggtaagattattcatgttaattcacgaatttttccggcagctacagctgatagtaatgttgaaagacgaggatttcgtcaaggacgtagattagttcgccggaaaaaacatcgtaaagttaggctggcagatttgtttcttgactcaaatcttttaacggacttttctaaagtatcccttaacttgaatccttatcaactacgtgttaaaggattaaatgaagaattaagtaatgaagaattgtttattgctttaaaaagcatagtcagccgtagaggaataagttatcttgatgatgctagcgaagatagcggagctaattcttcagaatatggaaaagctgtggaagaaaatcgaaagctgcttgaagataggactcctggacaaatccaattggaacgctttgagaaatatggcaaagttcgtggggattttacagttgttgaaaatggggagaatcatcgtttaattaatgtattttctacttcagcctacaaaaaagaagcagagcgaattcttagaaggcaacaagaattcaatattaggattgcagatgaattcattgaagcttatttaactattttgactggcaaaagaaaatattatcatgggcctggaaatgaaaaatctagaacagattacggaagatttcggacagatggcacaactcttgataatatttttggtattttgattgggaaatgcactttttatcctgatgaatatcgggctgcaaaagcttcctatacagctcaggaattcaatttactcaacgatttaaacaatttaacagtaccgacagagactaagaagttaagtgaagaacaaaaacgacagattattgaacatgcaaaaactgtaaaaactttaggggctccaaccttattgaaatacattgctaagttggttggctgctctgctgacgatataaaaggctatcgaattgataagtccgataagcctgaaatccatacttttgaagcctatcgtaagatgcggaccatggagttaatcaaggttgctgacttatcacgtgaaagcttagatgcacttgctcatattcttacgcttaatacagaacgagagggtattgaagaagctatcagagacagatttactaataaagagtttaatcaggaacaaattaatgaactggttctgtttaggaagaataacagttctttatttggaaaaggatggcacaatttttcacttaagttgatgaaggaactgattccagagctttatgagacttctgaggaacaaatgacaattctgacaaggcttggaaaacagagagtgaagaaatcttctaatagaaccaactatattgatgaaaaggaattgactgaagaaatctataatccagtagttgctaaatcagttcgccaggctattaagattatcaatcttgccacaaaaaaatatggtgtttttgataatattgttatagaaatggcgcgtgaaagcaatgaagatgatgagaaaaaagcgattcagaatgctcaaaaagcaaatgaagatgaaaaggaagcagccttgttaaaagcggctcatcagtttaatggtaaagaagagctcccagacagcattttccatggacacaaagaactgttgacaaaaattcgtctctggcatcagcaaggcgaaaagtgtctttatactggaaagactatattcattaatgacttgattcacaatccttataaatatgaaattgatcacatcttacctctatcactatcatttgacgatagtctggcaaataaagttttggtcctctccactgccaaccaagagaaaggtcaacgaactccgttccagtctctagatagtatggatggtgcttggacttatagagagttcaaagcctatgtaaaaggattaaaaacactgagcaataaaaagaaagattatcttctaaatgaggaagatattaataagaatgaggtcaaacaaaaattcattgaacgaaatttagttgatactcgctattcatcacgtgttgttctgaatactttgcaagatttctacaaaaaaagagaatttgatacaaagatctctgttgttcgtggacagtttacttcccaaatcaggagaaaatggcggattgagaaaacacgggaaacttatcatcatcatgctgtcgatgctttgatcatcgcagcatccagtcagctcaatctttggaagaagcaaaataaccctctaatttcctacaaggaagatcagtttgtagatccagaaactggtgagattctttctctgtcagatgatgaatataaggaattagtatttaaggctccctatgatcactttgtggatacattgaaaagtaagaaatttgaagatagcattctcttttcttatcaggttgattctaagtataatcgcaagatatcagatgctactatttatggcacgagaaaagctcgacttgggaaagatagccaagaagaaacttatgtacttggaaaaattaaggatatctattctcaaaaaggctatgaagactttatcaagaagtataagaaagataaaactcagtttttgatgtaccataaggacccacaaacgtttgaaaaggttattgaagaaattctcaaaacctattcggacaaagagttgaacgaaaaggggaaagaagttccttgcaatccttttgaaaaatatagacaggaaaatggacctgttcgtaaatacagtaaaaaagggaatggcccggaaattaagagcattaagtattatgacaataaactcggcaatcatattgatattactccaaataatagtcatcatcaggttgttttgcagtctttgaaaccttggcgaacagatgtttattttaatcctaagtcaggtaagtatgaactgatgggactaaagtattcagatttacgatttgaaaaagtaagtggagattatggcatttcggttaaaaaatataatgaaatcaaatcaaaagaaggagtcgacgagaattcagaatttaaatttaccctttataagaacgatttgattttgattaaagatactgaaagtggagaacaggagttgtttagattcttgtccagaacgatgccaaatcaaaaacattatgttgagttaaaaccttatgataaatctaagtttgaagggcatcaaaaattaatggacatatttggagaagttgctaaaggcggtcaatgcctcaaagggctaaacaagtccaacatctccatctacaaggtcaaaacagatgttcttggtaataaatatttcattaaaaaagagggtgatcagccacagctcaattttaagaaaaaaatctaa

SEQ ID NO: 368 - DNA, 4123 bp, Steptococcus oralis SK304
atggaaaacaaaaattactctatcggactcgatatcggaactaacagcgtcggatgggccgtcattactgacgattataaagttccatcgaaaaagatgaaagttctgggtaataccgataaacgatttatcaagaaaaatctcatcggggctctattgtttgatgagggaactactgctgaggctagacgccttaaacgaactgcacgtcgtcgctatacccgccggaaaaatcgtcttcgctatcttcaagaaatctttgctgaggaaatgagcaaggtagatagtagtttctttcatcgattggatgactcctttttaattcctgaggataaaaaagggagtaaataccctatttttgctaccttgatagaagaaaaagaatatcataagcaattcccaactatttatcatttgagaaagcaattagcagattcaaaagaaaaaactgacttgcgattgatttatctagcattagctcatatgattaaatatcgcgggcattttttatacgaagatacatttgatattaaaaacaatgatatccaaaaaatctttaatgaatttataagcatttacaacaacacctttgaaggaaattcgcttagtggacaaaacgtacaagtagaagcaatttttactgataaaattagcaaatctgcaaagagagaacgcgttctaaaactctttcctgatgaaaaatccactggtctcttttcagaatttctcaagttaattgtaggaaatcaggctgattttaaaaaacattttgacttagaagaaaaagctccactacaattctctagagatacctatgatgaggatttggaaaacttactcggacaaattggagatgactttgcagaccttttcgtggccgctaaaaaactctatgatgcgattcttctatcaggcattttgactgtcacagatccttcaaccaaggctccactgtcagcatctatgattgagcgctatgaaaatcaccaaaaagacttagccactttaaaacaattcatcaaaaccaatcttccagaaaaatatgatgaagtcttttctgaccaatctaaagatgggtatgctggatatatcgatggcaagaccacacaagaatccttttacaaatatatcaaaaatcttctctctaaattcgaaggagcagattatttccttgagaaaattgaacgtgaagattttttgagaaaacaacgtacctttgataatggttctattcctcatcaaattcatcttcaagaaatgaatgccattctccgtcggcaaggagaacattatccattcctgaaggaaaacaaagaaaagattgaaaaaatcttaaccttccgtatcccttactacgtcggcccattagctcgtggcaatcgtgattttgcttggctgactcgaaattctgaccaagcaatccgaccttggaatttcgaagaaattgttgataaagcaagctctgcggaatccttcatcaataaaatgactaactatgacttgtatctcccagaggaaaaagttttgcctaagcatagtctgttgtatgaaacatttgctgtctacaatgaattaacaaaagtaaaatttattgcagaaggattgagagactatcaattccttgatagcaggcaaaagaaagatattttttatactctttttaaggccgaggataaaagaaaagtaaccgaaaaagacatcatccagtatctacatactgttgatggctacgatggaatcgaactaaaaggaattgaaaaacaatttaacgctagtctttctacttatcatgatttactcaagattatcaaggataaagagtttatggatgaccctaataatgaagagattcttgaaaatatcgtccatacgctaactatctttgaagatcgtgagatgattaagcaacgccttgctcaatatgactctctctttgatgagaaagttattaaagcactaactcgtcgacattatactggttggggaaaactctcttctaagctaattaacggtatccgcgataaacaaactggcaaaacgattcttgattatctaatggatgatggctacaacaatcgtaactttatgcagttaatcaatgatgacgagctttctttcaaagaaattatcaaaaaagcacaagtggttggtaagacagatgatgtgaaacaagttgttcaagaacttccaggaagccctgccattaaaaagggaattttacaaagtatcaagcttgttgatgaacttgtcaaggttatgggacacgaacctgagtccattgtgattgagatggcacgagaaaatcagacaactgccagagggaaaaagaattcccaacaaagatataagcgaattgaagattcgttgaaaatcttagcatctggtcttaacgccaaaattctaaaagaacatccaacagataatattcaacttcaaaatgatcgtctcttcctctactatctccaaaatgggagggatatgtatactgggaaacctcttgacatcaaccaactgagcagctatgacattgaccacatcgtcccacaagcctttatcaaggatgattctcttgataaccgtgtcttgacgagtttaaaggataatcgtggcaaatctgataatgtcccaagtcttgaagtagttgaaaagatgaaaactttttggcaacaattgttggattccaaattgatttcttaccgtaaatttaataatttaaccaaagctgaacgcggcggactagatgagcgagataaagttggttttattaaacgccaactagttgaaacacgtcaaatcacaaaacacgttgctcagatcttagatgctcgctataatacagaagtgaatgagaaggataagaagaaccgtaccgtcaaaatcatcactttgaaatccaacctggtttccaacttccgtaaagaatttaggttatacaagatacgggaaatcaacgactaccaccatgcacatgatgcctatttaaatgcagtggttgctaaggctatccttaagaaatatcctaagctagagcctgaattcgtctatggtgactatcaaaagtacgatcttaagagatacatctcaagatccaaagaccctaaagaaatcgaaaaagcaactgaaaagtatttcttctactcaaacttgttgaacttctttaaagaagaggtgcattacgcagacggaactatcgtaaaaagagagaatatcgaatactccaaagataccggagaaatcgcttggaataaggaaaaagatttcgctacaatcaaaaaagttctttcacttccgcaggtgaatattgtgaagaagcgagaggtgcaaacaggtggcttctctaaagagtccattcttcctaagggaaattctgataagctaatccctcgaaaaacaaaggatattctttgggacactactaaatatgggggatttgatagtccggttatcgcctactcaatcttgctcattgccgatatcgaaaaaggaaaagcaaaaagactgaagactgtcaaaactctagttggtatcacgattatggaaaaagccacttttgagaagagtcctatagctttccttgaaaataaaggctatcataatgtccgtaaagaaaatatcctctgcctacctaagtatagtttatttgaactgaaaaatggtcgcagacggatgttagcaagtgcgaaagaacttcaaaaaggcaatgaaatcgtgcttccagtacatttaacaaccttgctctaccatgctaaaaacattcatagactagacgagccagaacatttggaatatattcagaaacaccgaaatgaatttaagggtttattaaatcttgtatctgagttctcccaaaaatatgtcctcgcagatgcaaatctagagaaaatcaagaacttatatgcagacaatgagcaggcagatatagaaatcctagcaaattcgtttatcaatttgttgacctttactgctttgggtgctcctgctgcctttaaattttttggcaaagatgttgatcgaaaacgatacacaactgtatccgaaatcctcaacgccaccctcatccaccaatccatcactggtctctacgagactcggattgacttgagcaaactaggagaagactaat

SEQ ID NO: 369 - DNA, 3378 bp, Streptococcus anginosus 1_2_62CV
atgaacggtttggttttaggattggatatcggtattgcttctgtcggagtgggaattttaaataaagaaacaggcgagattattcatgctaattcgagaatttttccagctgcaactgcagacagcaatgtagaacgtcggggatttagacaaggaagaagacttggtcgaaggaagaaacatcgcagcgctcgcttaaacaacctttttgaagaattcggttttataacagatttttctgctatccctttaaatttaaatccttatgctctgcgtgtgaagggattaagcgaagaattaacaaatgaagagttgtttattgcgcttaaaaacattattaaacggcgtggtatcagctatctagacgatgctagtgaagatggagaaacagcttccaatgagtatggaaaagcagttgaagaaaacagaaaattacttgcagacaaaacgcctggacaaatccagttggaacgttttgaaaaatacggacaagttcgtggggattttacagttgttgaaaatggggagaatcatcgtttaattaatgtattttctacttcagcctacaaaaaagaagcagagcgaattcttagaaggcaacaagaattcaatgtgaggatttcagatgaattcattgaagcttatttaactattttgactggcaaaagaaaatattatcatgggcctggaaatgaaaaatctagaacagattatggaagatttcggacagatggcacaactcttgataatattttcggtattttaattggaaaatgtactttttatcctgatgaatatcgagcagcaaaggcgtcttataccgcgcaggaatttaatttgctcaacgacctcaataatttaacagttccaactgaaacgaaaaaattgagtccagaacaaaagcggcagattgttgagtatgctagaactgcaaaaactttaggaactccaactttactgaaatatattgctaagttagtagacggttctattgatgacataaaaggatatcggattgataaatctgataaaccggagatgcatacttttgacgcctatcgtaaaatgagaacactagatctggtgaatatagatgcattatcgagagaaaccttagacgacttagcacacattctaaccttgaatacagaaagtgaaggtattttagaagctcttaacagtaaaatgcctagtacatttaccaaagagcagattgatgagttaattcagtttaggaagaaaaacagtgcggtatttggaaaaggttggcataatttttctcttaagttaatgaatgaattgatttcggagctttatgagacttcagaggagcaaatgactattttgactcgtctaggtaaacagagaagtagagaaatttcaaaacgaactaaatacatagatgaaaaagaattaacagaagaaatctataaccctgtagtagcaaagtctgtcagacaggcaataaagataatcaatgaagcaactaaaagatatggtatttttgataatatcgttatcgaaatggctcgtgaaaataacgaagaagatgcaaagaaagattatatcaagcgtcaaaaagcaaaccaagatgagaaaaatgcttctatggaaaaagcggctttccaatacaatggaaaaaaagagttaccagatagtatttttcatggccataaggaattagctactaagattcgtttatggcaccagcagggagaacgctgcctttatacgggaaagaatatctctattcgtgatttaattcataatccacatcagtatgaaattgatcatattctgccgctttcactttcttttgatgatggcttggccaataaggttctggtgctagcaacagctaatcaggaaaagggacagagaacaccattccaggctatagatagtatggatgatgcgtggtcttacagggagttcaaacaatatgtccggaattctaaaagcttaagtaataagaaaaaagactatctgctgaccgaagaagatatcagcaagattgaagtaaaacaaaaattcattgagcgcaatctcgtggacacacgttactcatcacgggtagtcctaaatactttgcaggaattttacaaaacaaatgatttcgatacaaaaatttcggttgttcgtggtcaatttacatcacagctgagaagaaagtggaaaattgaaaaaagtcgtgatacctatcaccaccacgcagtagatgctctcatcattgcggcctccagtcagttaagactctggaaaaagcagaataatcctttgatttcttataaagaagggcagtttgtagatcctgaaacgggagagattctttcactgacagatgacgaatataaagaacttgttttcagaccaccatatgattattttgtagatacattgaagagcaaatcgtttgaagacagtatcttgttttcttatcaagtggattctaaatataaccgaaaaatatcagatgctacaatctatggaactagaaaagctcagttggggaaagataagcaggaggaaacttatgtacttggaaaaattaaggatatctattctcaaaagggttatgaagattttatcaagagatataataaagatgaaactcagttcttgatatatcacaaagatccacagacctttgaaaaagttattgaagaaattcttaaaacctatcctgacaaagagttaaacgaaaagggtaaagaaattccctgcaatccttttgaaaagtacagacaagaaaatggtcctattcgaaaatacagcaaaaagggcaaaggcccagagattaaaagccttaagtattatgataataaacttggtaatcatattgatattactcctgtaaacagtcagaaccaggttgttttgcagtccttgaagccttggcggacagatgtttattttaatccccggacttccaaatatgaattgatgggattgaaatactcagatttaagatttgaaaaagggagtggaagctacggtatttcacctgaaaaatataataaagtcaaagcaaaagaaggagtgaacgaggattcagaatttaaatttactttatataagaacgatttgattttgataaaagacaccgaaactggagagcagcaattatttaggtatggttcgcgaaacgatacctcaaaacattatgttgagttaaaaccttatgaaaaagctaaatttgaaggaaatcaacagctgatgaatttgttaggaaccgttgcaaaaggtggtcaatgcctcaaagggataaacaagcctaatctctccatctataaagtcaaaacagatgttcttggtaataaatatttcattaaaaaagagggtgatcagccacagctcaattttaagaaaaaattttaa

SEQ ID NO: 370 - DNA, 4191 bp, Streptococcus anginosus DSM 20563
atgactaaaccatactcaattggcctcgatattggtaccaacagtgtaggttgggctgtgattactgatgactataaagttccagctaagaagatgaaagttttagggaatacaaatcgagattatatcaagaaaaatcttttaggtgcccttttgtttgatgggggagaaacagctgagggaagacgcttgaaacggactgctaggcgccgttatactcgccgaaaaaatcgtctacgctatttgcaagaaatttttgctgaggaaatgatgcaagtcgatgagagtttttttcagcgcttggatgattcatttcttgttgaagaagataagcaaggaagcaaatatcctatttttggaactttaaaagaggaaaaagagtatcataaaaaatttaaaacgatttatcatttaagggaagaattagcaaattcaaaagagaaagctgatttgcgtttggtgtatttggctttggctcatatgattaaattccgtggtcactttctctatgagggcgacctaaaagctgaaaatacagatgttcaagcattatttaaggattttgtagaagaatatgataagactattgaagaaagccatttatcagaaataacagttgatgcattaagtatcctaacagaaaaggttagtaagtctagccgtttagaaaaccttattgctcattatccaactgagaagaaaaatactttatttgggaatcttattgctttatctttggggctacaggcaaactttaaaacgaatttccaattatctgaagatgctaagttgcaattttctaaagatacgtacgaagaagatttagaagggttacttggggaagttggagatgaatatgcggacctgtttgtatctgctaaaaatctttacgatgccatcttgctgtcagggattttgacagtagatgataactcaacaaaagcacctttgtctgcttcaatggttaaacgctataaagaacacaaagaagaattagctgcttttaaacgttttataaaggaaaaacttcctaaaaaatatgaggaaatttttaaggatgatacaaaaaacggttatgcaggctatgttggtgctgataaaaagttacgaaaaagaagtgggaaattagcaactgaagaagaattttataaatacgtgaaggggattttaaataaagttgaaggtgcagattattttcttgacaaaattgatcgtgaagattttctgagaaaacaaagaacatttgataatggttctattccgcatcaaatccatctgcaagaaatgcatgctatcttgcgacgccaaggtgaacactatccattcttgaaagaaaatcaagataagattgaaaaaatcttaacgtttagaattccttactatgttggtcctttggcgcgaaaaggcagccgttttgcctgggcagaatataaggcggatgaaaaaattacgccatggaattttgatgatattcttgataaagaaaaatcagcagaaaaattcatcacacgcatgactttaaatgatttgtatttacctgaagaaaaagtcttacccaaacacagtcctctatacgaaacctttaccgtttacaacgagttgaccaaagttaagtatgttaatgaacagggtgaagctaaattctttgatacaaatatgaaacaagagatttttgatcatgtttttaaagaaaatcggaaagttacgaaagataaacttttaaattatttgaataaagagtttgaagaatttagaattgttaacttaactggactggataaggaaaataaagcctttaatgcaagtcttggaacttatcacgatttgcgtaagattttagataaatcattcttagatgataaagtaaatgaaaagataattgaggatatcattcaaacactaactctgtttgaagacagagaaatgattcgccagcgtcttcaaaagtatagtgatatttttacaacacagcaattgaaagaattggaacgccgtcattacactggttggggacgcttgtcatacaagttgatcaatggcatccgaaataaagagaataagaaaacaatattagactatctaatcgatgatggttatgctaatcgtaattttatgcagttgattaatgatgatgctctttcttttaaagaagaaattgctagggcacaaatcattggtgatgttgatgatattgcaaatgtagtgcatgacttacctggaagtcctgctatcaagaaagggattttacaaagtgtcaaaatcgttgatgaattagtcaaagtaatggggcataaccctactaatattattatagagatggcgcgtgaaaatcaaacgacagataaggggcgtagaaattctcagcaacgtcttaaattattacaagattcattgaagaatttggacaatcctgtaaatattaagaatgtggaaaatcagcaacttcaaaatgatcgattattcttgtactatatccaaaatggcaaggatatgtatacaggagaaactttagatattaacaatctaagccaatatgatatagatcacattattccgcaagcctttattaaggataattcacttgataaccgtgtgctgactcgttctgacaaaaacagaggtaaatctgatgatgtaccaagtatagaagttgttcatgaaatgaagtcattttggagcaaacttctttcagtaaaactgattacacaacgcaaatttgataatttaaccaaggcagaacgtggcggtctgaccgaaaatgataaagcaggttttattaaacgtcagttagttgagacaagacaaattactaagcatgttgcgcaggttttagatgctcgttttaatgcaaagcatgatgagaataaaaaagtgattcgagatgttaaaatcattactttgaaatctaatctagtttcacaatttcgaaaggactttaagttttacaaagtacgtgaaattaatgattatcaccatgcacatgacgcttatctcaatgcagttattggaacagctttgttgaaaaaatatcccaaacttgcatcagaatttgtatatggtgaattcaaaaaatatgatgtccgtaaatttattgcgaaatctgataaggaaattggaaaagctacagcaaaatatttcttttattcaaatttgatgaacttctttaaaaaagaggttaaatttgcagacggtacagtagttgagaggcctgatattgaaacaagcgaggatggcgaaatagcttggaataaacaaaccgactttaaaattgttcgcaaggttctctcctatccgcaggttaatattgtgaagaagactgaggtacagactcatggtctagatagagggaagccaaggggactttttaatgctaatccttctcctaaacctaaaccagatagtagtgaaaatttagtggggataaagagaaatcttgaccctaagaaatatggtggttatgcaggtatttcaaattcttatgctgtattggttaaagcgattattgaaaaaggagtcaagaaaaaagaaacgatggtactagaatttcagggaatttccattttagaccgaattacttttgaaaaagataaaagagctttcttgttaggaaaaggatacaaagatattaaaaaaatcattgagctacctaaatacagcttgtttgaattgaaagatggatcccgtcgcatgttagctagcattctttcaacaaataataaacgtggagaaattcataaaggaaatgaattgtttgttccacaaaagtttacaactctgctatatcatgccaaacgaattaacaatccaatcaacaaagatcatatagaatatgttaagaagcatagagatgattttaaagagttgctcaactatgtattagaatttaatgaaaaatatgtgggggctactaaaaatggagagcgtttaaaagaagcggtggcggattttgacagcaaaagcaatgaagaaatttgtactagctttttaggagccgttaatagtaagaatgcaggcttatttgagttaacctcattaggaagtgcctcagattttgaatttcttggtgtaaaaattcctagatatagagattacactccctcatcgctattaaaggattctatcctcatccaccaatccatcacgggtctttatgaaacacggattgacttgagtaagttaggagaagattga

SEQ ID NO: 371 - DNA, 3468 bp, Streptococcus dysagalactiae subsp equisimilis
atggataagaaatactcaataggcttagatatcggcacaaatagcgtcggatgggcggtgatcactgatgattataaggttccgtctaaaaagttcaaggttctgggaaatacagaccgccacagtatcaaaaaaaatcttataggggctcttttatttgacagtggagagacagcggaagcgactcgtctcaaacggtcagctcgtagaagatatacgcgccgaaagaatcgtattcgttatttgcaggaaatctttagcagtgagatgtccaaagtagatgatagtttctttcatcgacttgaagagtcttttttggtggaagaagacaagaagcatgaacgtcatcctatttttggaaatatagtagatgaagttgcttatcatgagaaatatccaactatctatcatctgcgaaaaaaattggcagattctactgataaagcggatttgcgcttaatctatttggccttagcgcatatgattaagtttcgtggtcattttttgattgagggagatttaaatcctgataatagtgatatggacaaactatttatccagttggtacaaacctacaatcaattatttgaagaaaaccctattaacgcaagtagagtagatgctaaagcgattctttctgcacgattgagtaaatcaagacgattagaaaatctcattgctcagctccccggtgagaagagaaatggcttgtttgggaatctcattgctttgtcattgggattgacccctaattttaaatcaaattttgatttggcagaagatgctaaattacagctttcaaaagatacttacgatgatgatttagataatttattggcgcaaattggagatcaatatgctgatttgtttttggcagctaagaatttatcagatgctattttactttcagatatcctaagagtaaatagtgaaataactaaggctcccctatcagcttcaatgattaaacgctacgatgaacatcatcaagacttgactcttttaaaagctttagttcgacaacaacttccagaaaagtataaagaaatcttttttgatcaatcaaaaaacggatatgcaggttatattgatgggggagctagccaagaagaattttataaatttatcaaaccaattttagaaaaaatggatggtactgaggaattattggcgaaactaaatcgtgaagatttgctgcgcaagcaacggacctttgacaacggctctattccccatcaaattcacttgggtgagctgcatgctattctgagaagacaagaagacttttatccatttttaaaagacaatcgtgagaagattgaaaaaatcttgacctttcgaattccatattatgttggcccattggcgcgtggaaatagtcgctttgcatggatgactcggaagtctgaagaaacgattactccatggaattttgaagaagttgtcgataaaggtgcttcagctcaatcatttattgaacgcatgacaaactttgataaaaatcttccaaatgaaaaagtactaccaaaacatagtttgctttatgagtattttacggtttataacgaattgacaaaggtcaaatatgttactgagggaatgcgaaaaccagaatttctttcaggaaagcagaaagaagccattgttgatttactcttcaaaacaaatcgaaaagtaaccgttaagcaattaaaagaagattatttcaaaaaaatagaatgttttgatagtgttgaaatttcaggcgttgaagatcggtttaatgcgtcattaggtacctaccatgatttgctaaaaattatcaaagataaagattttttggataatgaagaaaatgaagatattttagaggatattgttttaacattgaccttatttgaagataaggaaatgattgaggaacgacttaaaacatatgctcacctctttgatgataaggtgatgaaacaacttaaacgtcgccattatactggctgggggcgtttgtctcgaaaattgattaatggtattagggataagcaatctggtaaaacaatattagattttttgaaatcagatggttttgccaatcgcaattttatacagctgattcatgatgatagtttaacattcaaggaagctattcaaaaagcacaggtgtctggacaaggccatagtttacatgaacagattgctaacttagctggcagtcctgctattaaaaaaggtattttacagtctgtaaaagttgttgatgaactggtcaaagtaatggggcataagccagaaaatatcgttattgaaatggcacgtgaaaatcagacaactcaaaagggccagaaaaattcgcgagagcgtatgaaacgaatcgaagaaggtatcaaagaattaggaagtcagattcttaaagagcatcctgttgaaaatactcaattgcaaaatgaaaagctctatctctattatctacaaaatagaagagacatgtatgtggaccaagaattagatattaatcgtttaagtgattatgatgtcgatcacattgttccacaaagtttcattaaagacgattcaatagacaataaggtcttaacgcgttctgataaaaatcgtggtaaatctgatgacgttccaagtgaagaagtagtcaaaaagatgaaaaactattggagacaacttctaaacgctaagttaatcactcaacgtaagtttgataatttaacgaaagctgaacgtggaggtttgagtgaacttgataaagctggttttatcaaacgccaattggttgaaactcgccaaatcactaagcatgtggcacaaattttggatagtcgcatgaatactaaatacgatgaaaatgataaacttattcgagaggttaaagtgattaccttaaaatctaaattagtttctgacttccgaaaagatttccaattctataaagtacgtgagattaacaattaccatcatgcccatgatgcgtatctgaatgccgtcgttggaactgctttgattaagaaatatccaaaactagaatcggagtttgtctatggtgattataaagtttatgatgttcgtaaaatgattgctaagtctgagcaggaaataggcaaagcaaccgcaaaacgtttcttttattctaatatcatgaactttttcaaaacagaaattacacttgcaaatggagagattcgcaaacgccctctaatcgaaactaatgaggaaaccggagaaattgtctgggataaagggcgagattttgccacagtgcgcaaagtattgtccatgccacaagtcaatattgtcaagaaaacagaagtacagacaggtgcactgactaatgaatcaatttatgctagaggaagttttgataaattaatcagtcgtaaacatcgttttgagtcctctaaatatggaggatttggcagcccgactgttacttatagtgtgttagtagttgcgaaataccaaagttacaagatggaaaagtaa

SEQ ID NO: 372 - DNA, 4047 bp, Streptococcus equi subsp zooepidemicus
atgaaaaaaccttatactattgctcttgatattggtactaatagtgtaggatgggttgttgtgacggatgattatagggttccaacaaagaaaatgaaggtactaggaaatacagagcgaaaaaccattaagaaaaatttgattggtgccttattatttgatagtggtgatactgcagagggaactcgcttaaaaagaacggcccgtcgcagatatacaagaagaaagaatagactacgttaccttaaagaaatttttactgaggaaatggcaaaagtagatgatggtttctttcaacgactggaggattcattctatgttttagaggataaggagggaaataagcatccgatttttgctaatctagcagatgaagttgcttatcataaaaagtatccaacaatttatcatttacgaaaagagttagtagataatcctcaaaaagcagatttacgcttaatttatttggcagtagcgcatattattaagtttaggggacattttctgattgagggaacattaagttcaaagaataataatcttcagaaatcatttgatcatcttgtggatacctataatctattgtttgaggagcaacgattgcttactgaaggcattaatgccaaagagctgttgtctgcagcattaagtaagtcaaagcgtttagaaaatctcatttctctgattcctggacaaaagaaaacgggtatttttggtaatattattgcactctcgctaggattaacaccaaattttaaagctaattttggtttaagtaaggatgtcaaattacagttggctaaggatacctatgctgatgatttggatagtctactggctcaaattggagatcagtatgctgatttattcttagcggctaaaaatttatcagatgccattcttttgtcagatattttgacagaaagtgacgagataactagagcacctctgtcagcgtctatggtaaaacgttatcgtgagcatcacaaggacttggtcactttgaaaacattaataaaggatcagttaccggagaagtaccaggaaatttttttagataagactaaaaatggttatgctggatatattgagggacaagttagccaggaggaattttacaaataccttaagcctattttagcaagattggatggatcggaaccgttacttctaaaaattgaccgagaagactttttgagaaagcaacgaacctttgataatggctctattcctcaccaaattcatttagaagaattacacgctattttgagaagacaagaagtcttctacccatttttaaaagataatagaaagaaaattgaatctcttttaacgtttagaataccttattatgtgggtccgttggctcgtggtcatagtcgctttgcatgggtaaagcgaaaattcgatggggctattagaccctggaattttgaagagattgttgatgaagaagcttccgcacagatctttattgaaaaaatgactaaaaatgatctctacttgccaaatgaaaaggttcttcctaagcatagcctattatatgaaacttttacagtttataatgagctaacaaaggtcaaatatgctactgaaggaatgacacgtcctcaatttttatctgctgatcagaaacaagctattgttgacttattgtttaaaacaaatcgtaaagtgactgttaaacaattaaaagagaactattttaaaaagattgagtgctgggatagtgttgagattactggggttgaagatagcttcaatgcttcacttgggacctatcatgacttgttaaaaatcattcaggataaggattttttagataatcctgacaaccagaaaatcattgaagatattattttgaccttaacactttttgaagataaaaaaatgatttcaaaacgattagatcaatatgcacatctctttgataaagtcgtattgaataaactggagaggcatcactataccggttgggggcgtttatcaggaaagcttataaatggtattcgagacaaacaatcaggaaaaacaattttagattttctaaaggctgatggttttgccaatcgaaactttatgcagttaattcatgatagtgaactaagctttatagatgagattgctaaagcccaagtgattggaaaaactgagtattcgaaagacctggttgggaatttagcgagtagtccggctattaaaaaaggtatttcacaaacaattaaaatcgttgatgagctggtcaaaatcatgggctatctcccgcagcagattgttattgaaatggcacgtgaaaatcagactacagctcaaggaattaaaaatgctcgtcaacgcatgagaaagctagaagagactgccaaaaaattgggtagcaatattctgaaggagcaccctgttgataatagtcaattgcaaaatgataagcgttacctctattatcttcaaaatggaaaggatatgtatacgggtgatgacttagatattgattatttgagtagctatgacattgatcatatcattccgcagagctttattaagaataattccattgataacaaggtattaacctcacaaggcgctaatcgaggaaaattagataatgttcctagtgaggctattgttaggaaaatgaaaggctattggcaatccttattgagagcaggagctatctcaaagcaaaaattcgataatctgacaaaagcagaacgtggaggtttaactcaagtagacaaagccggctttatccaacgtcaattagtggagacacgccaaatcacaaaacatgtggcacaaatcttagatagtcgcttcaatactgaatttgatgatcataataagcgtattcgaaaggttcatattataacgctaaaatcaaagctggtttctgatttccgtaaagagtttggtttgtataaaattcgtgatatcaatcattatcatcatgctcatgatgcataccttaatgctgttgttgccaaagcgatactaggtaagtatcctcaactagctccagaatttgtttatggagattaccccaaatataatagctttaaggaacgccagaaagcaactcaaaagacgttattctattcaaatatcttaaaattctttaaagatcaagaaagtcttcatgttaactctgatggtgaagaaatatggaatgccaataagcatttacctattattaaaaatgttctttcgattccgcaggttaatatcgtcaagaaaacggaagtacaaacagggggcttctataaagagtccattttgtctaagggtaattctgataagctgatcccaaggaaaaataactgggataccaggaagtatggtggctttgatagtccaactgtagcttattctgttttggtgatagctaaaatggaaaagggaaaagcaaaagtattaaagccagtgaaggaaatggttggtattaccattatggagaggatcgcatttgaagaaaatcctgtagtctttttagaagcaaaaggctatcgagaaattcaagagcatctcattataaaactccctaaatatagcttgtttgaattagaaaatggaagaagacgtttattggcaagtgctagtgaactacaaaaaggaaatgaattgtttcttccagttgattatatgacatttctatatttagctgctcattaccatgagctaactggatcctcagaggatgttttgaggaaaaaatattttgtagagaggcatttgcattattttgatgacattattcaaatgattaatgattttgcagagcgtcatattcttgctagtagtaatttagagaaaataaaccatacatatcacaataattctgaccttccaattaatgaaagagcagagaatataattaatgtgtttactttcgtagccctaggagcacctgcagcctttaaattttttgatgcgactattgatcgaaaacgatatacctcaactaaggaagtgctaaatgccactctcattcatcaatctgttactggtttgtatgagacgcgaattgatttgagtcaattaggagagaactaa

SEQ ID NO: 373 - DNA, 3411 bp, Streptococcus gordonii Challis substr CH1
atgaacggtttagttttaggtttagatattggtattgcctctgtaggggtggggattctagaaaaagatacggggaagatcattcatgctagttctcggctttttccagctgcaactgccgacaataatgtcgaaagaaggagtaatagacagggaagacgattaaatcgcaggaaaaaacaccgtagtgttaggcttcaggatctatttgaaggctatggtttgttaactgatttttctaaagtgtcaatgaatttaaatccttatcaacttcgtgtacaaggaatggagaatcaactcacaaacgaagagttgtttgttgcattgaagaatattgttaaaaggcgtggtattagctatttagatgatgcttctgaggatgggggtacagtatcgtctgattatggtaaggcagttgaagaaaatagaaaattacttgctgaaaagacacctggtcaaatccaactagagcgttttgaaaaatatggtcaattaaggggagattttactgttgaagaaaatggtgaaaaacatcgattgatcaatgtcttttcaacatctgcttatagaaaagaagctgaaagaattcttagaaaacagcaagaatttaatagtaaaattactgatgagtttatagaggattatttaataatccttacagggaaaagaaaatattatcatggaccaggtaatgaaaaatctcggacagattatggacgttttcgaacagatggtactaccttagataatatttttggtattttaattggcaaatgtacattttatactgaggaatatagagcttcaaaagcctcctatactgctcaagagtttaatttactaaatgatttaaataatttaacagttcctacagagaccaagaaacttagtgaggaacaaaagaagctaatcattgaatatgcaaagtcggcgaaaacattaggagcttcaactttattgaagtacattgctaaaatgattgatgcttcagtagatcagatacgtggttaccgagttgatgtaaataataaacctgaaatgcatacttttgaagtctatcggaaaatgcaatctttagaaacgataaaagttgaagaattgcctagaaaagttctagatgagcttgctcatattctaactttgaatacagagcgagaaggtatagaagaagcgattaactcgaagttaaaggatatatttaatcgagatcaagtacttgaattggttcaatttagaaaaaataatagcagtctatttagtaaaggatggcataatttttctattaaactcatgatggagttgataccagaactttatgaaacttcagaagagcaaatgacaattctcacacgattgggaaaacaaagatctaaagagacatcaaaacgaactaagtatattgatgaaaaagaattaacagaagaaatctataatcctgtagtagcaaaatctgttagacaggccataaagataatcaacgaagcaactaaaaaatatggtatctttgataatatcgttatcgaaatggcccgtgaaaataacgaagaagatgctaagaaagattatataaaacgtcaaaaagcaaaccaagatgagaagaatgcggctatggaaaaagcagcgtttcaatacaatggtaaaaaagagttaccagataacatttttcatggccataaggaattgactactaagattcgtttatggcatcaacagggagaaaagtgtctctatactgggaagaatattccaatttcagatttaatccacaatcagtacaagtacgaaatcgatcatattttacctttatctctatcttttgatgatagtttatctaataaagtattagttctagctactgcaaaccaagaaaagggacaacgaacaccgtttcaggctttagatagtatggatgatgcatggtcctaccgtgagtttaaatcatatgtaaaagattcaaaattattaagtaataaaaagaaagattatcttttaacagaagaagacattagtaaaattgaggtgaagcagaagtttattgaacgaaatctagttgatactagatattcttctcgagttgttttaaatgccttgcaagatttttataagagccatcaattggatacaactatttcggtggtacgtggacaatttacctctcagctaaggagaaagtgggggattgaaaaatctcgtgagacctaccaccatcatgctgtggatgcattaattattgctgcttccagtcaattaagattatggaaaaaacatagtaatcctctgattgcttataaagaagggcaattcgttgattcagagactggagaaatcgtttcattaagtgatgaagaatacaaagagttagtatttaaagcaccttatgatcattttgttgacacattacgtagtaagaagtttgaggatagcattttgttttcatatcaagtggattcaaaatataaccgtaaaatttcagatgcgaccatttatgcaacaagaaaagcaaaattggataaagagaaaaaagaatatacttatactttggggaaaataaaagatatctatgctttagggacaaaaactccgtctaaaacaggattttataagtttttagatttatacaagacggataaatctcaattcttaatgtatcagaaggataggaaaacttgggatgaagtaatagagaagataattgaacaatatcgaccatttaaagaatatgacaaaaatggaaaagaggttgatttcaatccttttgaaaaatatagaattggaaatggtcctattcggaaatatagtaaaaaagggaatggtccagaaattaaaagtctgaaatactacgatatattattaggtaaacacaaaaatataactcctgatgggagtcgaaatactgtagctttgttatctttaaatccttggagaacagatgtttactacaattcggaaactaaaaaatatgaatttttgggattaaagtatgcagatttgtgtttcgaagaggggggagcctatggtatttctgaagttaagtataaaaagataagagagaaagaaggaattggtaagaattctgaatttaagtttaccctgtataagaatgatttaattttaattaaagatactgaaacgaattgtcaacaattctttagattttggtctcgtactgggaaagataatccaaaaagttttgaaaaacataaaatagaattgaaaccttatgaaaaagcaaaatttgagaaaggagaagaacttaaagtattaggaaaggtaccaccttcctctaatcaattccaaaaaaatatgcaaatagaaaatctttctatttacaaagtcaaaacagatattttaggaaataaacatttcatcaaaaaagagggtgatgaaccaaaactcaaatttaaaaaataa

SEQ ID NO: 374 - DNA, 3390 bp, Streptococcus infantarius subsp infantarius
atgagtaatggaaaaattttaggcttggatattggtgtagcttccgttggtgttggtattattgattcaaaaacaggaaatgtaatacatgccaattcgcgtttattttctgctgcaaatgctgaaaataatgctgaaaggagaggttttcgcggtgcaagacgtttaacccgtcgtaaaaaacatcgtgtaaaacgtgttcgtgatttatttgaaaaatatgatatttcaactgattttagaaatctaaatttaaatccgtacgaacttcgtgttaaagggttaacggaacaattaacaaatgaagaattgtttgctgctttgcgtacaattgcaaaaagacgcggcatttcatatcttgatgatgcagaagatgattcaacaggtagttcagattatgcaaaatctattgatgagaatcgtcgtttgttgaaaactaaaactccaggtcaaattcaattagaacgattggaaaaatatggtcaattacgtggaaacttcacagtgtatgatgaaaatggtgaagctcatagactaattaacgttttctctacttctgattataagaatgaagcacgtaaaattttagaaactcaatcaaactataataaacaaattacagatgagtttattgaagactatattgaaatcctaactcaaaaaagaaaatattaccatgggccaggtaacgaaaaatctcgtacagattacggacgttttcgtacagatggaacaaccttggagaatatctttggaattttgattggaaaatgtagtttttatcctgaagaataccgtgcttctaaagcttcatatactgcgcaagagtttaactttttaaatgatttaaataatttaaaagttcctactgaaactggtaaattgtctactgagcagaaagagtatttagtagattttgctaagaaatcaaaagcactcggtgcttctaaattattaaaagaaattgcgaagatagtagattgtagtgtagatgatattaagggctatcgagtagataataaagataagccagatttgcatacttttgagccttatcgtaagttaaaatttaatttaagttcaattgatattgatgaactatcaagagaaacattagataaactggcagatattttaacgcttaatacagaacgtgagggtattgaagatgctatcaaacgcaatcttccaagtcaatttaccgaagaacaaatttctgaaattgtccaaattaggaaaaatcaaagttcagcattcaataaaggttggcatagcttttcagctaaattgatgaatgaattaatccctgaactgtatgtaacatctgaagaacagatgacaattttgacaagactagaaaaattcaaggttaataaaaaatcatcaaaaaatacaaaaacaattgatgaaaaagaaataacagatgaaatttataatcctgttgtagcaaaatcagttcgacaaacaattaaaatcattaatgcggctgttaagaaatatggcgattttgataagattgttatcgagatgccacgagataagaatgctgaagatgagaagaaatttattgataaaaagcaaaaagaaaataaaaaagaaaaagatgattctttaaaacgagcagcttttctttataatggtactgataacttacctgatggcgtttttcatggcaataaagagttaaaaactaaaattcgcctttggtatcaacaaggtgagcgttgtttatattctggtaagctaatttctattcatgatttagtgcataattcaaataagtttgagattgatcatattttgcctctatcactttcttttgatgatagtttagctaataaggttttagtgtatgcttggactaaccaagagaagggacaaaaaactccttatcaagttattgattctatggatacggcatggtcatttagagaaatgaaagattatgtcttaaaacaaaaagggcttggtaagaaaaaatgtgaatatcttttaacaacagaaaatatcgataaaatcgaagttaaaaagaaatttatcgaacgtaatcttgtggacactcgttatgcttcacgagtagtgcttaatagtcttcaaacagcattaaaagagttggggaaagatactaaagtttctgttgtcagaggtcagtttacatcacagctccgccgaaaatggaatattgataaatcgcgcgaaacataccaccatcatgctgttgatgctttaattattgctgcttcaagtcaattgaaattgtggcaaaaacaagaaaatccgatgtttgagagctatggtgaaaatcaagtggtgaataaagagactggtgaaattttaagtatctctgatgataaatataaagaattagttttccaaccaccttatcaaggatttgtaaatacgatttcaagtaaaggatttgaggatgaaattttattctcttatcaagttgattcaaaatttaatcgtaaagtctctgatgctactatttactcaacacgaaaagctaaacttggaaaagataaaaaagatgaaacttatgttttagggaagataaaagatatctacagtcaagatggttttgatacttttattaaaagatataaaaaagataaaacacaattcttgatgtatcaaaaagatcctctaacttgggaaaatgttattgaagttattctcagagattatccaagtgaaaaactttccgaagatggtaaaaaaactgtaaaatgcaatcctttcgaagagtatcgtagagaaaatggcttaatctgtaaatacagtaaaaaaggaaatggaacaccaattaagtctcttaagtattatgataaaaaattaggaaattgtattgatataacacctgaaaaatctaaaaatagagttgtattgagacaaatttctccatggcgagctgatatttactttaatctagagactttaaaatatgaactgatgggattgaaatattctgatttaagttttgaaaaaggaactggtaagtatcatatctcacaagaaaagtatgatgcgataagggaaaaagaaggtatcggcaaaaaatcagaatttaagtttactctttaccgaaatgatttgattttaatcaaagatactctaaataattgtgaaaggatgttaagattcggctcaaaaaatgatacatctaagcactatgtggaattaaaaccattagaaaaaggaacttttgattctgaggaagaaattttaccagttttgggaaaagttgcaaaaagtggacagtttattaaaggtttaaataaacctaacatatcaatctataaagttcgaacagatgttcttggtaataaattctttattaaaaaagaaggtgataaacctaagttagattttaaaaataataacaaataa

SEQ ID NO: 375 - DNA, 3378 bp, Streptococcus intermedius B196
atgaacggtttggttttaggattggatatcggtattgcttctgtcggagtgggaattttaaataaagaaacaggtgaaattattcacgttaattcgagaatttttccagctgcaaccgcagacagcaatgtagaacgtcggggatttagacaaggaagaagacttggtcgaaggaagaaacatcgcagcgctcgcttaaacgacctttttgaagaattcggttttataacagatttttctgctgtccctttaaatttaaatccttatgctctgcgtgtgaagggattaagcgaagaattaacaaatgaagagttgtttattgcgcttaaaaacattattaaacggcgtggtatcagctatctggatgatgctagtgaagatggagaaacagcttccaatgagtatggaaaagcagttgaagaaaacagaaaattacttgcagacaaaacgcctggacaaatccagttggaacgttttgaaaaatacggacaagttcgtggggattttacagttgttgaaaatggggagaatcatcgtttgattaatgtattttctacttcagcctacaaaaaagaagcagagcgaattcttagaaggcaacaagaattcaatgtgaggatttcagatgaattcattgaagcttatttaactattttgactggcaaaagaaaatattatcatgggcctggaaatgaaaaatctagaacagattatggaagatttcggacagatggcacaactcttgataatattttcggtattttaattggaaaatgtactttttatcccgatgaatatcgagcagcaaaggcgtcatataccgcgcaggaatttaatttgctcaacgacctcaataatttaacagttccaactgaaacgaaaaaattaagaccagaacaaaagcggcagattgtcgagtatgctcgaactgcaaaaactttaggaactccaactttactgaaatatattgctaagttagtagatggttctattgatgacataaaaggatatcggattgataaatctgataaaccggagatgcatacttttgacgcctatcgtaaaatgagaacactagaactggtggatgtagatatattatcaagagaaaccttagatgatttagcgtacattctaaccttgaacacagaaagtgaaggtattttagaagctcttaacagtaaaatgcctggtacatttaccaaagagcagattgatgagttaattcagtttaggaagaaaaacagtgcggtatttggaaaaggttggcataatttttctcttaagttaatgaatgaattgattccggagctttatgagacttcagaggagcaaatgactattttgactcgtctaggtaaacaaagaagtagagaaatttcaaaacgaactaaatacatagatgaaaaagaattaacagatgaaatttataaccctgttgttgccaaatctgtccgtcaggctattaaaatcatcaacttagcgaccaaaaaatatggcatttttgataatattgtcattgaaatggcgcgtgaaagcaatgaagatgatgagaaaaaagcaattcaaaacgtccaaaaagccaatgaagatgaaaagaaagcagcaatggaaaaagctgctgatctatacaatggtaaaaaagagttaccagacagtatttttcatggacacaaagagttagcaaccaaaattcgcctttggcatcaacagggagaacgctgcctttatacaggaaagaacatctctattcatgatttaattcataatccacaccagtatgaaattgatcatattctgccgctttcactttcttttgatgatggcttagccaataaggttctggtgctagcaacagctaatcaggaaaagggacagagaacaccattccaggctttagatagtatggatgatgcgtggtcttacatagagttcaaacaatatgtccggaattctaaaagcttaagtaataagaaaaaagactatctgctgaccgaagaagatatcagcaagattgaagtaaaacaaaaattcattgagcgcaatctcgtggacacacgttactcatcacgggtagtcctaaatacgttgcaggaattttacaaaacaaatgatttcgatacaaaaatttcggttgttcgtggtcaatttacatcacaactgagaagaaagtggaaaattgaaaaaagtcgtgatacctatcaccaccacgcagtagatgctctcatcatcgcggcctccagtcagttgagactctggaaaaagcagaataatcctttgatttcttatagagaagggcagcttgtagatcctgaaacgggagagattctttcactgacagatgacgaatataaggaacttgttctcagaccaccatatgattattttgtagatacattgaagagcaaatcgtttgaagacagtatcttgttttcttatcaagtggattctaaatataaccgaaaaatatcagatgctacaatctatggaactagaaaagctcagttggggaaagataagcaggaggaaacttatgtacttggaaaaattaaggatatctattctcaaaagggctatgaagattttatcaagagatataagaaagatacaactcagttcttgatgtatcacaaagatccacagacctttgcaaaagttattgaagaaattcttaaaacctatcctgacaaagagttaaacgaaaagggtaaagaaattccctgcaatccttttgaaaagtacagacaagaaaatggccctattcgaaaatacagcaaaaagggcaaaggcccagagattaaaagccttaagtattatgataataaacttggcaatcacattgatattactcctgtaaacagtcagaaccaggttgttttgcagtccttgaagccttggcggacagatgtttattttaatccccagacttccaaatatgaattgatgggattgaaatattcagatttaagatttgaaaaagggagtggaagctacggtatttcacctgaaaaatataataaagtcaaagcaaaagaaggagtggacgaggattcagaatttaaatttactttatataagaacgatttgattttgataaaagacaccgaaactggagagcagcaattatttaggtatggttcgcgaaacgatacctcaaaacattatgttgagttaaaaccttatgaaaaagcgaaatttgaaggaaatcaacagctgatgaatttgttaggaaccgttgcaaaaggtggtcaatgcctcaaagggataaacaagcctaatctctccatctataaagtcaaaacagatgttcttggtaataaatattttattaaaaaagagggtgatcagccacagctcaattttaagaaaaaaatttaa

SEQ ID NO: 376 - DNA, 4122 bp, Streptococcus lutetiensis 033
atggaaaaaacatattcaatcggactcgatatcggaacaaacagtgtgggttggagcgtaattaccgatgattacaaagttccagctaaaaagatgaaagtcttaggaaatactgataaaaagtatattaagaagaacttattaggtgcactgttatttgatagtggtgaaactgctgaagtaactcgtttaaaacgtacagctagacgtcgctacacacgccgtaaaaatcgtttacgttatttgcaagaaatttttgctaaagaaatggcaaaagttgatgaaagtttctttcaacgtttagaagaatcatttctgacagatgatgataaaacctttgattcccatccaatttttggaaataaagccgaagaagatgcttatcatcaagagtttcctacaatttaccatttgagaaaacatcttgcagattcatctgaaaaagcagatttacgcttggtttatctagctttagctcatatgattaaattccgtggacatttcttaattgagggtgaattgaacgctgaaaatacagatattcaaaagttattcaatgattttgttgaaacatatgataagattgctgatgaaagtcatttgtcggaagttgatgcttcaagtatcctaactaacaaaattagtaaatcacgtcgtttggaaaatcttattaaacaatatccaacagaaaagaaaaatactttatttggaaatcttgtagcattagttttaggattgcaacctaacttcaaaacaaactttaaattatccgaagatgcaaaattacaattttctaaagatacttatgatgaagatttggaagaattgttggggaaaattggtgatgactatgctgatctttttacagcagctaaaaatctatatgatgcaattttactttcaggtatcttaacagtagatgataattcaactaaagcaccattatctgcttcgatgattaaacgctatgaagagcaccatgaagatttagaaaagttaaaaaaatttattaaagtgaataattttgataagtatcatgagatttttaaagataaaagtaaaaatggttatgctggatatattgaaaatggtgttaagcaagatattttttataaacatcttaagagcattatttctgagaaaaacggaggtcaatatttccttgataaaattgaacgtgaagattttttgagaaaacaaagaacgtttgataatggctctattccacatcaaattcatttacaagaaatgcgtgctattttacgacgtcaaggtgagtattatccattcttaaaagaaaatcaagctaaaattgaaaaaatattaacttttagaatcccttactacgtaggtccattagcaagaaaagatagtcgttttgcttgggctaattaccattcagatgagccgattacaccgtggaattttgatgaagtggtggataaagaaaaatcagctgaaaagtttatcacacgaatgactttaaatgatttatatttacctgaagaaaaggttttaccgaaacacagtcatgtatatgaaacatttacggtttataatgaattaacaaaaattaagtatgttaatgaacaaggtgagtcgtttttcttcgatgcaaatatgaagcaagaaatctttgaccacgtatttaaagaaaatcggaaagttacgaaagctaaacttttaagctatcttaataatgagttcgaagagtttcgaatcaatgatttaattggtcttgataaagatagtaaatcatttaatgcaagccttggaacttatcatgatttgaaaaagattttggataaatctttcttagatgataagacaaatgaacaaatcattgaagatattgtgttgactttgaccttatttgaagatagagatatgattcatgaacgtcttcaaaaatacagtgatttctttacttcgcaacagttgaagaaacttgaacgtcgccattatactggttggggacgtctatcatataaactgattaatggaattcgcaataaggaaaataacaaaactattcttgatttcttgattgatgatggtcatgctaaccgcaattttatgcaattgattaacgacgagtcattatcatttaaaactattattcaagaagcacaagttgtaggtgatgtcgatgatattgaagctgttgttcatgatttacctggaagtcctgctattaaaaaaggtattctacaaagtgtcaaaatcgttgatgagctagttaaagtgatgggagataaccctgataatattgttattgaaatggcgcgtgaaaatcaaacaactaatagagaaagaagccagtcccaacaacgtttgaaaaaacttcagaactcattaaaagagttaggaagtaatattcttaatgaggaaaaaccgtcatatattgaagataaggttgaaaatagtcatcttcaaaacgatcaactcttcctttactacattcaaaatggtaaagatatgtacactggtgatgagttagatattgaccatctaagcgattatgatattgaccacattattcctcaagcctttattaaggataactctattgataatcgagtactaacaagttctgctaaaaatcgaggtaaatcagatgatgtaccaagtcttgatattgttcgtgctagaaaggcagaatgggttcgattgtataaatcaggactaatctctaaacgtaaatttgataatttaacgaaagccgaacgtggtggattaactgaagctgataaagccggatttattaaacgccaattagttgaaacacgtcaaatcacaaaacatgtcgcacaaattttagatgcccgttttaatacaaaacgtgatgaaaatgacaaggtgattcgtgatgtaaaagtcattactttgaaatcaaacttagtttcgcaattccgaaaagaatttaaattctataaagttcgtgaaattaatgattatcaccacgctcacgatgcttatctcaacgcagtagttggaacagctttgcttaaaaaatatccaaaattaacaccagaatttgtatacggtgagtataaaaaatatgatgttcgtaaacttattgccaaatcttctgatgactattctgaaatgggtaaagcaacagcaaaatatttcttctattcaaatttgatgaacttctttaaaactgaggtcaaatatgcagatggtagagtatttgaacgaccagatattgagacaaatgcagatggtgaagttgtctggaataagcaaaaagattttgacattgttcgaaaagttctgtcataccctcaagttaatattgttaagaaggtagaagagcagacagtcggacaaaatggtggtttatttgataataatatcctagccaaacctgaaaaagatgataagaaaaaattatttccaattaaaaaatcactttctacaacttcatatgggggatatgctagagctacaatagcttattctattttgattgttagtgaatttggtaaaaataaagaattgaaattactaggtctaccacttcttgataaagtaaaatatgagaaaaatcctattgcatatttaaatagtattggaataataaatgtaaaaagtatctttaaacttcctaagtactgtttatttgaatttcaagaaaagaacactaattatcgtagatatatggtaagtaatcaggaattaaaaagggctaatcaattgtttttaacatgtaaagagactgagttagtatacaagtatataaaaagtgataacgacaatacacatttagttggtaatgaaaagacaatattatctatctggaataaattggttatttttatggaaagaactaaattaattgataagaaattgtttgcgtcgttgaaacaattaaaagacgaagttgacttaataaatattttagatatgactgctaaatcattggattttactaaaattagtgcaggacagaagaaaatcacaataagtgattctttatcgttaccaatcaagcgatggcaattttctagtgatgaaaaaatgttaaaacaattaaagactgccacccttatccaccaatctgtcactggcctttatgaaacacgtattgatttgagtaaattaggagaagagtaa

SEQ ID NO: 377 - DNA, 4179 bp, Streptococcus mitis SK321
atgaacaataacaattactctatcggactcgatatcggaacaaacagcgtcggatgggccgtcattacggatgactataaggtgccatcgaaaaagatgaaagttctaggcaatacagataaacactttatcaagaaaaatctaattggagctttattatttgatgaaggagctactgctgaagatagacgtttcaaacgaacagcacgccgtcgctatactcgtcgaaaaaatcgtcttcgctatcttcaagaaatcttttctgaggaaatgagcaaagtggatagtagtttctttcatcgattagatgactcattcttagttcctgaggataaaagaggaagtaaatatcctatttttgctaccttggcagaagaaaaagaatatcacaagaaatttccaactatctatcatttgagaaaacaccttgcggactcaaaagaaaaaactgacttgcgcttgatctatctagcattagcgcatatgattaaataccgcggacattttttgtatgaagaatctttcgatattaaaaacaatgatatccaaaaaatctttagcgagtttataagcatttacgacaacacctttgaaggaagttcacttagtggacaaaatgcacaagtagaagcaatttttactgataaaattagtaaatctgctaagagagaacgcattctaaaactctttgcttatgaaaaatccactgatctattttcagaatttctcaagctgattgtaggaaatcaagctgattttaagaaacactttgacttggaagaaaaagctccactacaattctctaaagatacctatgatgaggatttggaaaacttactcggacaaattggagatgactttgcagaccttttcctagttgctaaaaaactctatgatgccattcttttatcaggaatcttaactgttacagattcttcaactaaggccccactatcagcatctatgattgagcgctatgaaaaccaccaaaaagacttagcggctttaaaacaattcatccaaaacaatcttcaagaaaaatatgatgaagttttctctgaccaatctaaagatgggtatgctaggtatatcaatggcaaaaccactcaagaagcattttacaagtacatcaaaaatcttctctctaaattcgaaggatcagattatttccttgataaaattgaacgtgaagatttcttgagaaaacaacgcacctttgataatggttctatccctcatcaaattcatcttcaagaaatgaatgccattatccgtcggcaaggagaacattatccatttctgaaggaatataaagaaaagatagagacaatcttgactttccgtattccttattatgttggcccattggctcgtggaaatcgtaattttgcttggcttactcgaaactctgaccaagcaatccgaccttggaattttgaagaaattgttgatcaagcaagctctgcggaagaattcatcaataagatgactaactatgacttgtatctgccagaggaaaaagttttgcccaagcatagtctcttgtatgaaacatttgctgtctacaatgaattaacaaaagtaaaatttatttcagagggattgagagactatcaattccttgatagtgggcaaaagaagcaaattgtcaatcaattattcaaagagaaaagaaaagtaactgaaaaagacatcattcagtatctacacaatgttgatggctacgatggaatcgaactaaaaggaattgaaaaacaatttaacgctagtctttctacttatcatgatttactcaaaataatcaaggataaagagtttatggatgatcctaaaaatgaagagattcttgaaaatatcgtccacacactaactatctttgaagatcgtgagatgatcaagcaacgccttgctcaatatgcctctatctttgataaaaaagtgatcaaggcactgactcgtcgacattatactggttggggaaaactctctgctaagctaatcaacggtatctgtgataaaaaaactggtaaaacaattcttgactacttgattgatgacggctacagcaatcgtaactttatgcagttaatcaatgatgacgggctttccttcaaagatattattcaaaaagcacaagtggttggtaagacaaacgatgtgaagcaagttgtccaagaactcccaggtagtcctgctattaaaaagggaattttacaaagtatcaagcttgtcgatgagcttgtcaaagttatgggccatgctcccgagtccattgtgattgaaattgcacgagaaaatcagacaactgccagagggaaaaagaattctcaacaaagatataagcgcattgaagatgcactaaaaaatttagcacctgggcttgattcaaatatattaaaagaacatccaacagataatattcaacttcaaaatgaccgtctcttcctttactatctccaaaatgggaaggatatgtacactggagaagctcttgatatcaaccaactgagcagctatgacattgaccacatcgtcccacaggcctttatcaaggatgattctcttgataaccgtgtcttgactagttcaaaggataatcgtgggaaatccgataatgttccaagtttagaagtcgttcaaaaaagaaaagctttttggcaacaattactagattccaaattgatttcagaacataaatttaataatttaaccaaggctgaacgtggtgggctagatgagcgagataaagttggctttatcagacgccaactagttgaaacacggcaaatcacaaaacatgttgctcagattttggatgcccgttttaatacagaagtgaatgagaaagataagaagaaccgtaccgtcaaaattatcactttgaaatccaatctagtttccaacttccgtaaagaatttaagttatataaggtacgcgaaatcaatgactaccaccatgcacatgatgcctatttaaatgcagtggtggctaaggctatccttaagaaatatcctaaactagagcctggattcgtctatggtgactatcaaaagtacgatattaagagatatatttccagatccaaagatcctaaagaagttgaaaaagcaactgaaaagtatttcttctactcaaacttgttgaacttctttaaagaagaggtgcattacgcagacggaaccatcgtaaaacgagagaatatcgaatactctaaggacactggggaaatcgcttggaataaagaaaaagatttcgctacaattaaaaaagttctttcacttccgcaggtgaatattgtgaagaaaacagagattcaaacacatggtctagatagaggtaaacctagaggattgttcaattccaatccatctcctaaaccttcagaagatcgtaaagaaaaccttgtcccaattaaacaagggcttgacccacgaaaatacggtggttacgctggtatttctaactcatacgcggtcttagttaaagctattattgaaaaaggagcgaaaaaacaacaaaagaccgttcttgaatttcaaggtatctctattttagataaaataaattttgaaaagaacaaagaaaactatcttcttgaaaaaggatacataaaaattctatcaactattactttacctaaatatagtttgtttgagtttcctgatggtacaagaagaagactagcaagtattctatcgacaaacaataaacgaggagaaattcataaaggtaatgaattggtcatccctgaaaagtatacgactcttttgtatcatgctaagaatattaataaaacacttgaaccagaacacttagagtatgttgagaaacatcgaaatgattttgctaaacttttagaatatgtacttaactttaacgataagtatgtaggcgcattaaaaaatggagaaagaatcagacaagcatttattgattgggaaacagttgatattgaaaagttatgtttcagtttcattggtccaagaaatagtaaaaatgctggtttattcgagttaacttcacaaggaagtgcttctgacttcgagttcttgggagtaaaaattccacgatacagagactatacaccttcgtcactcctcaacgccaccctcatccaccaatccatcactggtctttacgagactcggattgacttaagcaaactgggagaagactga

SEQ ID NO: 378 - DNA, 4038 bp, Streptococcus mutans UA 159
atgaaaaaaccttactctattggacttgatattggaaccaattctgttggttgggctgttgtgacagatgactacaaagttcctgctaagaagatgaaggttctgggaaatacagataaaagtcatatcgagaaaaatttgcttggcgctttattatttgatagcgggaatactgcagaagacagacggttaaagagaactgctcgccgtcgttacacacgtcgcagaaatcgtattttatatttgcaagagattttttcagaagaaatgggcaaggtagatgatagtttctttcatcgtttagaggattcttttcttgttactgaggataaacgaggagagcgccatcccatttttgggaatcttgaagaagaagttaagtatcatgaaaattttccaaccatttatcatttgcggcaatatcttgcggataatccagaaaaagttgatttgcgtttagtttatttggctttggcacatataattaagtttagaggtcattttttaattgaaggaaagtttgatacacgcaataatgatgtacaaagactgtttcaagaatttttagcagtctatgataatacttttgagaatagttcgcttcaggagcaaaatgttcaagttgaagaaattctgactgataaaatcagtaaatctgctaagaaagatagagttttgaaactttttcctaatgaaaagtctaatggccgctttgcagaatttctaaaactaattgttggtaatcaagctgattttaaaaagcattttgaattagaagagaaagcaccattgcaattttctaaagatacttatgaagaagagttagaagtactattagctcaaattggagataattacgcagagctctttttatcagcaaagaaactgtatgatagtatccttttatcagggattttaacagttactgatgttggtaccaaagcgcctttatctgcttcgatgattcagcgatataatgaacatcagatggatttagctcagcttaaacaattcattcgtcagaaattatcagataaatataacgaagttttttctgatgtttcaaaagacggctatgcgggttatattgatgggaaaacaaatcaagaagctttttataaataccttaaaggtctattaaataagattgagggaagtggctatttccttgataaaattgagcgtgaagattttctaagaaagcaacgtacctttgacaatggctctattccacatcagattcatcttcaagaaatgcgtgctatcattcgtagacaggctgaattttatccgtttttagcagacaatcaagataggattgagaaattattgactttccgtattccctactatgttggtccattagcgcgcggaaaaagtgattttgcttggttaagtcggaaatcggctgataaaattacaccatggaattttgatgaaatcgttgataaagaatcctctgcagaagcttttatcaatcgtatgacaaattatgatttgtacttgccaaatcaaaaagttcttcctaaacatagtttattatacgaaaaatttactgtttacaatgaattaacaaaggttaaatataaaacagagcaaggaaaaacagcattttttgatgccaatatgaagcaagaaatctttgatggcgtatttaaggtttatcgaaaagtaactaaagataaattaatggatttccttgaaaaagaatttgatgaatttcgtattgttgatttaacaggtctggataaagaaaataaagtatttaacgcttcttatggaacttatcatgatttgtgtaaaattttagataaagattttctcgataattcaaagaatgaaaagattttagaagatattgtgttgaccttaacgttatttgaagatagagaaatgattagaaaacgtctagaaaattacagtgatttattgaccaaagaacaagtgaaaaagctggaaagacgtcattatactggttggggaagattatcagctgagttaattcatggtattcgcaataaagaaagcagaaaaacaattcttgattatctcattgatgatggcaatagcaatcggaactttatgcaactgattaacgatgatgctctttctttcaaagaagagattgctaaggcacaagttattggagaaacagacaatctaaatcaagttgttagtgatattgctggcagccctgctattaaaaaaggaattttacaaagcttgaagattgttgatgagcttgtcaaaattatgggacatcaacctgaaaatatcgtcgtggagatggcgcgtgaaaaccagtttaccaatcagggacgacgaaattcacagcaacgtttgaaaggtttgacagattctattaaagaatttggaagtcaaattcttaaagaacatccggttgagaattcacagttacaaaatgatagattgtttctatattatttacaaaacggcagagatatgtatactggagaagaattggatattgattatctaagccagtatgatatagaccatattatcccgcaagcttttataaaggataattctattgataatagagtattgactagctcaaaggaaaatcgtggaaaatcggatgatgtaccaagtaaagatgttgttcgtaaaatgaaatcctattggagtaagctactttcggcaaagcttattacacaacgtaaatttgataatttgacaaaagctgaacgaggtggattgaccgacgatgataaagctggattcatcaagcgtcaattagtagaaacacgacaaattaccaaacatgtagcacgtattctggacgaacgatttaatacagaaacagatgaaaacaacaagaaaattcgtcaagtaaaaattgtgaccttgaaatcaaatcttgtttccaatttccgtaaagagtttgaactctacaaagtgcgtgaaattaatgactatcatcatgcacatgatgcctatctcaatgctgtaattggaaaggctttactaggtgtttacccacaattggaacctgaatttgtttatggtgattatcctcattttcatggacataaagaaaataaagcaactgctaagaaatttttctattcaaatattatgaacttctttaaaaaagatgatgtccgtactgataaaaatggtgaaattatctggaaaaaagatgagcatatttctaatattaaaaaagtgctttcttatccacaagttaatattgttaagaaagtagaggagcaaacgggaggattttctaaagaatctatcttgccgaaaggtaattctgacaagcttattcctcgaaaaacgaagaaattttattgggataccaagaaatatggaggatttgatagcccgattgttgcttattctattttagttattgctgatattgaaaaaggtaaatctaaaaaattgaaaacagtcaaagccttagttggtgtcactattatggaaaagatgacttttgaaagggatccagttgcttttcttgagcgaaaaggctatcgaaatgttcaagaagaaaatattataaagttaccaaaatatagtttatttaaactagaaaacggacgaaaaaggctattggcaagtgctagggaacttcaaaagggaaatgaaatcgttttgccaaatcatttaggaaccttgctttatcacgctaaaaatattcataaagttgatgaaccaaagcatttggactatgttgataaacataaagatgaatttaaggagttgctagatgttgtgtcaaacttttctaaaaaatatactttagcagaaggaaatttagaaaaaatcaaagaattatatgcacaaaataatggtgaagatcttaaagaattagcaagttcatttatcaacttattaacatttactgctataggagcaccggctacttttaaattctttgataaaaatattgatcgaaaacgatatacttcaactactgaaattctcaacgctaccctcatccaccaatccatcaccggtctttatgaaacgcggattgatctcaataagttaggaggagactaa

SEQ ID NO: 379 - DNA, 3390 bp, Streptococcus orisratti DSM 15617
atgacaaatggaaaaattttaggtttggatatcgggattgcatctgtaggagttggtgttattgaagctgatacaggaaaagttgtccatgcaagttctcgattatttccatcagctaatgcggataacaatgcagagcgtcgaggttttcgtggtggaaggcgcttgattcgtcgtaagaagcaccgtatgaaacgtgtgaaagatttatttgaagaatataaactagagacacgatttaacaatctaaatttaaacccatatgagctaagggttagaggactgacagagaagctggcacctgaggaactgtttgctgcattgaaaaatctcagtaagcatcgggggatatcttatcttgatgatgcagaagatgataatgcaagtgctaaaactaactatgctaaatctgttttagctaataaagagcttctaaaaacaagaacaccaggacaaattcaatgggaacgctttgaaaaatatggtcagatacgtggagattttgacattgtgacacctgagggagagcaacagcggattatcaatgtcttttcaacgacagattataaaaaagaagcagagcaaatcttggagacacaagcactctattatcctcaaattagttcagaatttattgaggattttattactattttaacctcaaaaagaaaatattatcatggcccaggaaatgaaaaatctcggacggactatggacgctatcgcacggatggtacaacgcttgataatatttttgatattttagttggaaaatgtggtatctatccagatgagtaccgtgcagcaaaggcttcctatactgcacaagaattcaattttttaaatgatttgaataatttgacacttcctacagagaccaagcgtttaagcactgatcagaaaaaagacctagtcagatttgcaactactgctgcaactttaggacctgacaaattactaaaagaaattgctaggatggttggatgctccaaagatgatatcaaaggctatcgtattgacaataaagaaaaaccagatttgcatacttttgaagcttatcgagcgatgaccaaattaaatacctttgatgtagctaccttctctagagaaatgatagatgagctagcacgtattttaactctaaatacagacagagaaggaattgaagaggctatcgtaaacgattttcccaatctattttctagggaacaaattgatgaattgattcagtttagaaaatcaaaaagccagctatttggaaaaggttggcatagcttctcactgaaattaatgtcagaacttattcctgagttatatgctactagtgaagaacagatgaccattttgacgagattaaataaaatgtctcccgagcgaaaagtcactcttcgaaccaagtacatcaatgagcaggatgctacagaggagatttataatcctgttgttgctaaatctgttcgacaagctattaaaatcatcaatgaatgtatcaaaaagtggggagaatttgatcagatcgttattgaaatgccacgtgataaaaatgaagatgatgagaagaagcgaattgcggatgggcaaaaagctaatgctaaggaaaaggcgagtgccacagagtttgcagcatctctttacaatgggaaaaaagaactgccagatgaggtctttcatgggcacaagcagttagctactaagattcgtttatggtatcagcaagacggaaaatgtttatacactggtcaagatatctctattcatgatttaattcataatcaaaatcaatatgaaattgatcatattatgcctttatccttatcgtttgatgatagtctgagcaataaggttttagttttagcaaccgcaaaccaagaaaaagggcagcaaacgccttatcaggctattccaaagatgaagtcagcctggtcttatagggaatttaaagcctttgttttggattgtaagaggttaagtaagaagaaacgtgagtatttattaacagaagaagatattgataaaattgaggtcagacgaaaatttattgcacgtaacttggttgatacacgctatgcttcgcgggtagtgctaactaccttacaagatgctttagaagtaatgaataaagagaccaaagtttcagtagttcgtggtcaatttacctcacaattgcgcagacagtggaaaattgataaaacacgagatacctatcatcatcatgctattgatgctcttattattgcggcttctagtcagttaaaattgtggaaaaaacaagataatccgatgtttgaagagtatgagcaaggtcaaaagatcaatttggaaacaggtgagattttatcagatgacgactacaagaaattagtcttccaatcaccttatcaaggctttgttcacacgatttcttcaaaatcatttgaggatgagattctcttttcttatcagatagattctaaggtcaaccgaaaaatctcggatgcaacgatttatgcgacaagacaagcgcaattatcaagagataggaaaaaagaaacctatgttttaggtaaaattaaagatatctatagccagacgggttatgatgccttccgtaaacgatatgataaagataagacagtatttttaatgtatcagaaggatcctttgacttgggaaaaggttattgaagtgattctacgtgattacaaagagtttgacgataaggggaaagaagtcggcaatccttttgaaagatatcggcaacaaaatggcttaatgactaagtatagtcgtaaaaacaaaggaaccccgattaaggcattgaaatattatgataataaacttggaaaccatgttgatgtcacaccagatgacagtaagaatcctgtggttttacaatctataaacccttggagagcagacttatactttaatcctaaaactgctaaatacgaattattaggactgaagtacgctgacttaagttttgaaaaaggaacaggaaattataccatctctcaagaaaaatacgatgaaatcaagaaaagagaaggtatttctgcagaatcagaatttaagtttactctttataaaaacgacctattattaataaaagatattgaaaatggcgaggaacaagtatttagatttttgtcacgtaccatgccaaatcaaaaacattatgttgagttaaaaccctatgataaggctaaatttgatggtgggcaatctttacttactgttttaggaacagttgccaaaggaggtcagtgtctaaaaagtttgaacaaagttggtatttccatctacaaagttaaaaccgatgttcttggttatcagcactttatcaaaaaagaaggaaatcagcctaaactgagctttgaaaatagtattaaacgacataaaaataaatga

SEQ ID NO: 380 - DNA, 3423 bp, Streptococcus parasanguinis F0449
atgaatggtttagttttgggtttggatattggtattgcttcggttggagtaggtattctaaaaaaagatattggtgaaattattcacactaattctcgtctgttttcagctgcaacggctgacagtaatattgaaagaagaggacataggggaggtaaaagattaactcgccggaagaaacatcgtagtattcgccttcatgatttatttgaagactttggtttgttaactgatttttctaaggtgtccattaatctaaatccttatcaactccgtgtacaagggttggataatcaattaactaatgaagagttgtttattgctttaaagaatattgtgaagagacgtggtattagctatttggatgatgcttctgaggatggcggtacagtatcgtctgattacggtaaggcagttgaagaaaatagaaaattacttgctgaacaaactcccggacaaattcaactagatcgtttcgaaaaatatggtcaggttagaggagatttcaatgttgtagaaaatggtgaaaagcgcagattaatcaatgtttttacaacatctgcttatagcaaagaagctgaaagaattcttagaaagcaacaagaattcaataaaaagattacagatgagtttatagaggattatctaacaatccttacgggaaagagaaaatactaccatggaccaggtaatgaaaagtcacgcaccgattatggaaggtatactactaagaaagatcctgaaggtaagtacataaccttagataatatttttggtattttaattggtaaatgtacattttatcctgatgaatatagagcttcaaaagcttcctatactgctcaagagttcaacttactaaatgatttaaataatttaactgttccaacagaaaccaagaaactgagtgaggaacaaaagaagacaattatcaagtatgcgaagacagctaaaacattaggagcttcaacactattgaagtacatcgctaaattaattggtgcctcagttgatcagatacatggataccgtattgatcccaataaaaaacctgagatgcatacttttgaaacctatcggaaaatgcaatcattagaaacaatcagcgtggaagaattaccgagaaaggtcttagatgagcttgcccatattctaactttaaatacagagcgagagggaatagaagaagcaattaacgcgacgctaaaagatacatttagtcaggatcaagtacttgaattggttcaatttagaaaaaataatagcagtctatttagtaagggatggcatagtttttctctaaaactcatgatggagttgattccagaattgtatgagacttcggaagagcaaatgacaattcttactcgattaggcaaacaaaaatctaaagagacatcaaaacgaaccaagtatattgatgaaaaagaattaacagaagaaatctataaccctgtggtagcaaaatctgtcagacaagctataaagattatcaatgaagcaactaaaaaatatggtatctttgataatatcgttattgaaatggcacgtgaaaataatgaggaagatgcaaagaaagagtatatcaagcgtcaaaaagcaaatctagacgagaaaaatgcagctatggaaaaagcggctttccaatacaatgggaaaaaagaattaccggataatgtttttcatgggcataaggaattagctactaagattcgtttatggcatcagcaaggagaaaagtgtctttacactggtaagaatataccaatttcagatttgattcaaaatcagtataagtatgaaattgatcatattttacccttgtctctttcttttgatgatagtttatccaataaagtattggtacttgctacagcgaaccaagaaaagggacaacgtacaccgtttcaagctttagatagcatggatgatgcctggtcttaccgtgagtttaaatcatatgtaaaagattctaaattattaggtaataaaaagaaggaatatcttttaacggaagaagacattagtaagattgaggtgaaacagaaatttattgaacgaaatttagtagatactcgttattcttctcgcgttgttctaaatgctctacaagatttttataaggagcatcaattcgatacaactatttcagtggtacgtggacaatttacttcgcaactcagaagaaagtggggacttgaaaaatctcgtgagacctatcaccatcatgctgtagatgctttgatcattgctgcatctagtcaattaagattatggaaaaaacaaaataatcctttgatctcttatacagaaggtcaattcgtggatcaagtaactggtgaaattatttcattgagtgacgatgaatataaagagttagtatttaaagcaccatatgatcattttgttgatacattgaagtccaagaaatttgaggatagcattctattttcttatcaagtagattcaaaatataaccgaaagatttcagatgcaacaatttacgcaacaagaaaagcaaaattagataaagagaacaaagaatacacttatactttaggaaaaataaaagatatctatgctttagggacaaaaagtccttctaaaacgggattttataaatttttagatttatacaataaggataaatcccaattcttgatgtttcagaaggatagaaaaacttgggatgaagtgatagagaagataatagaacaatatcgaccatttaaagaatacgatgaaaatggaaaagaagttgatttcaatccttttgaaaaatatagaattgaaaatggtcctattcgcaaatatagtaaaaaaggcaatggtccagaaattaaaagtctaaaatactacgataatcttttagggaaatttgttgatataactccttcagaaagtaagaatcctgtagctttgctttctttgaatccttggagaacagatgtatactacaatacagaaacaagcaaatatgaattcttaggattaaagtatgcagatttgtgtttcgaaaaaggtggtgcttacggaatttcagaagttaaatataataaaataagagagaaagaaggaattggtaaggaatctgaatttaagtttacactatataagaatgatctaattttaattaaggatactgaaacaaattgccaacaaatctttagattttggtctcggacagggaaggataatccaaaaagctttgaaaagcataaaatagaattaaaaccttatgaaaaagcaagatttgagaaaggagaggaacttgaggtattaggaaaggtaccaccttcttctaatcaattacaaaaaaatatgcaaatagagaatctttctatttataaagttaaaacagatgttttgggtaataaacatttcatcaaaaaagagggtgaagaaccaaaactcaaattttaa

SEQ ID NO: 381 - DNA, 4158 bp, Streptococcus salivarius K12
atgactaagccatactcaattggacttgatattgggacgaatagtgttggatgggctgtaataactgatgattacaaggttccatctaaaaaaatgaaagtcttaggaaatacgagtaaaaagtatatcaaaaagaacctgttaggtgcattactctttgactctggaatcacggcagagggaagaagattgaagcgtactgcaagaagacgttatactagacgtcgtaatcgtatcctttatttgcaggaaatttttagcacagagatggctacattagatgatgctttctttcaaagacttgacgattcatttttagtccctgatgataaacgtgatagtaagtatccgatatttggaaacttagtagaagaaaaagtctatcatgatgaatttccaactatctatcatttaaggaaacatttagcagatagctctaaaaaagcagatttgcgtctagtttatcttgcattggctcatatgattaaatatagaggtcacttcttaattgaaggagactttaattcaaaaaataatgatcttcagaagaactttcaagactttttggacacttataatgcaatttttgaatcggatttatcacttgagaatagtaaacaacttgaggaaattgttaaagataagattagtaaatcagcaaagaaagatcgtattttaaaactctttcctggggagaagaattcgggtattttttcagagtttctaaagttgattgtaggaaatcaagctgactttaggaaatattttaatttagacgaaaaaacttccttacagttttctaaagaaagctatgacgaagatttagagactttgttaggtcacattggagatgattacagtgatgtctttctcaaagccaaaaaactttatgacgctattcttttatcaggtattctgactgtaactgataatggtacagaagcacctctttcttctgctatgataatgcgatataaggaacacgaagaggatttggccttactaaaggcatacataagaaacatttcgctagaaacgtataatgaagtatttaaagacaatactaaaaatggttatgctggttatattgatggaaaaacaagtcaggaagatttctatgtatatctaaaaagactattggctggtcttgaaggtgcggactattttcttgaaaaaattgatcgagaagactttttaagaaagcaacgtacatttgataatggttcgataccatatcagatttatcttcaagaaatgagagcaattcttgataagcaagctaaattttatcctttcttggctaagaataaagaaagaattgagaagattttaaccttccgaattccttattatgtaggtccacttgcgagagggaatagtgacttcgcttggtcaataagaaaacgaaatgaaaaaattacaccttggaattttgaggacgttattgacaaagaatcttcggcagaggctttcattaatcgaatgactagttttgatttgtatttgccagaagagaaggtacttccaaagcatagtcttttatacgaaaattttacagtatataatgaattaacaaaagttagatttatcgccgaaggtatgagagattatcaatttttagatagtaagcagaagaaagatattgttcgactttattttaaaggtaaaaggaaagttactgataaggatattattgaatatttacatgcaattgatggatatgatggaattgaattaaaaggcatagagaaacagtttaattctagtttatctacttatcacgatcttttaaatattattaatgataaagagtttttggatgatagttcaaatgaaacgattatcgaagaaattatccatactttgacaatgtttgaagatagagagatgataaaacaacgtctttcaaaatttgataatatttttgataaatccgttttgaaaaagttatctcgtagacattatactggctggggtaagttatctgctaaactaattaatggtattcgtgatgaaaaatctggtaatactattcttgattacttaattgatgatggtgtttctaaccgtaatttcatgcaacttattcacgatgatgctctttcttttaaaaagaagataaagaaagcacaaattattggtgacaaagataatattaaacaggtcgttaagtctttgccaggtagtcctgcgattaaaaaaggtattttacaaagtataaaaattgtagatgaattggttaaagtaatgggaagggaacctgagtcaattgttgttgagatggctcgtgaaaatcaatataccaatcaaggtaagtctaattcccaacaacgcttgaaacgtttagaagaatctctcaaaggcttaggtagtaagatacttaaggaaaatgttcctacaagactttctaaaatagacaataacgcacttcaaaatgatcgactttatttgtattatcttcaaaacggaaaagatatgtataccggagaagaattagatattgatagattaagtaattatgatattgatcatattattcctcaagcttttttgaaagatgattctattgacaataaagtacttgtttcatctgctagcaaccgtggtaaatcagatgatgttccaagtttagaggttgttaaaaaaagaaagacactttggtatcaattattgaaatcaaaattaatttctcaacgaaaatttgataatctgacaaaagctgagcgaggaggtttgtcacaagaggagaaagctgggtttattcaacgccagttggttgaaacacgtcaaataacaaaacatgtagctcgtttacttgatgagagatttaataataaaaaagatgaaaataatagaacgttacgaacagtaaaaattattacattgaaatctagcttggtttctcagtttcgtaaggattttgaactttataaagttcgtgaaatcaacgattttcatcatgctcatgatgcctacttgaatgctgttgtagcaagtgctttacttaagaaataccctaaactagagccagaatttgtgtacggtgactatccaaaatacaatagttttagagaaagaaagtcagctacagaaaaggtatatttctattcaaatatcatgaatatctttaaaaaatctattcctttagctgatggcacagttattgacagaccacttattgaggtaaatgaagagacaggtgaatccgtttggaataaagtggcagacctaaatactgttagaaaagtcctttcatattcacaggttaatattgtcaaaaaagttgaggaacaaaatcacggattggatagaggaaaaccaaagggattgtttaatgcaaatctttcctcgaaaccaaaaccaaatagtaaagaaaatttagtaggtgctaaagagtaccttgaccccaaaaagtacggagggtatgctggaatttctaattcatttgctattcttgttaaaggtacaattgaaaaaggtgctaagaaaaaaataacaaatgtactagaatttcaaggaatttctattttagataggatttattatagaaaagataaacttaattttttacttgaaaaaggttataaagatattgagttaattattgaattacctaaatatagtttatttgaactttcagatggttcacgtcggatgttggctagtattttgtcaacgaataataagaggggagagattcacaaagggaatcagatttttatttcacagaagtttgtgaaattactttatcatgctaaaagaataagtagcacatttaatgagaatcatagaaaatatgttgaaaatcataaaaaagagtttgaagaattattttactatattcttgagtttaatgagaattatgttggagctaaaaagaatggtgaactcttaaaatctgcctttcaatcatggcaaaatcatagtatagatgaactctgtagtagttttataggacctaccggaagtgaaagaaagggactatttgaattaacctctcgcggaggtgctgctgattttgaatttttaggtgttaaaattccaaggtatagagactataccccatcatccctattaaaagatgccacacttattcaccaatctgttacaggcctctatgaaacacgaatagaccttggcaaactaggagaggattaa

SEQ ID NO: 382 - DNA, 4179 bp, Streptococcus sanguinis SK330
atggaaaacaaaaattactctatcggactcgatatcggaactaacagcgtcggatgggccgtcattacggatgactataaggtgccatcgaaaaagatgaaagtttttggcaatactgataaacactttatcaagaaaaatctaattggagctttattatttgatgaaggggctactgctgaagatagacgtctaaaacgaacagcgcgccgtcgctatacccgtcgaaaaaatcgtcttcgctatcttcaagaaatcttttctgaggaaataagcaagttggatagtagtttctttcatcgattagatgactcttttttagttcctaaggataagagaggaagtaaataccctatttttgctaccttggaagaagaaaaagaatatcataagaaattcccgactatctatcatttgagaaaacacctggcggactcaaaagaaaaaactgacttgcgcttaatctatttggcattagctcatatgattaaataccgcggacattttttatatgaagaatctttcgatattaaaaacaatgatatccaaaaaatttttaatgaatttataagcatttacgataacacctttgaaggaagttcacttagtggacaaaacgcacaagtagaagcaatttttactgataaaattagtaaatctgcaaagagagaacgcgttctaaaactcttttctgatgaaaaatccactagtctcttttcagaatttctcaagttaattgtaggaaatcaggctgattttaaaaaacattttgacttagaagaaaaagctccactacaattctctaaagatacctatgatgaggatttggaaaacttactcggacaaattggagatggttttacagaccttttcctagttgctaaaaaactctatgatgctattcttctatcaggaattttgactgtcacagatccttcaaccaaggccccactatcagcatctatgattgagcgctatgaaagccaccaaaaagacttggcagctttaaaacaattcatcaaaaacaatcttccaaaaagatataatgaagttttttctgaccaatctaaagacgggtatgctggatatatcgatggcaagaccactcaagaagcattttacaaatatatcaaaaatcttctctctaaattcgaaggagcagattatttccttgataaaattgaacgtgaagattttttgagaaaacagcgcacctttgataatggttctattcctcatcaaattcatcttcaagaaatgaatgccattctccgtcgacaaggagaacattatccatttctgaaggaaaacagagaaaagattgagaaaatcttgaccttccgtattccttactatgttggtccattggctcgtggcaatcgtgattttgcttggcttactcgaaattctgaccaagcaatccgaccttggaattttgaagaaattgttgataaagcaagctctgcagaagaattcatcaataagatgaccaactatgatttgtatttaccagaggaaaaagttctgcctaagcacagtctgttgtatgaaacatttgctgtctataatgaattaacaaaagtaaaatttattgcagaaggattgagagattatcaatttcttgatagtgggcagaagaagcaaattgtcaatcaattattcaaagaaaaaagaaaagtaactgaaaaagacatcatccattatctacataatgttgatggctacgatggaatcgaactaaaagggattgaaaaacaatttaacgcaagtctttctacttatcatgatttgctcaagattatcaaggataaagagtttatggatgaccctaaaaatgaagagattcttgaaaatatagtccatactctcacaatatttgaagatcgtgagatgattaagcaacgccttgctcaatatgactccatctttgatgaaaaagtgattaaagcactgactcgtcgacattatactggttggggaaaactctctgccaagctgattaacggtatctgtgataaacagacaggagatacgattcttgactacttgattgatgacggtaagatcaatcgcaactttatgcagttaatcaatgatgacgggctttctttcaaagaaattatccaaaaagcacaagtagttggtaaaacagatgatgtgaagcaagttgtccaagaacttccaggcagtcctgctattaaaaaaggaattttacaaagtatcaagattgttgatgagcttgtcaaggttatgggctatgctcctgaatcgattgtaattgaaatggctcgcgaaaatcagacaactgccagagggaaaaagaattcacaacaaagatataaacgtattgaagactcactgaaaaatctagcacctggacttgattcaaacatattaaaagaaaatcctacagataatattcaacttcaaaatgatcgcctcttcctctactatctccaaaatgggaaggatatgtacacaggaaaacctcttgatattgaccaattgagtagctatgacattgatcatatcatccctcaggctttcattaaggatgattcgatcgataaccgtgtcttgactagttcaaaggataatcgtggtaaatccgataatgttccaagtttagaggttgttcaaaaaagaaaagctttttggcaacaattgttggattccaaattgatttcagaacgtaaatttaataatttaaccaaagctgaacgaggtggactagatgagcgtgataaagttggctttatcagacgccaactagttgaaacacggcaaataacaaaacatgttgcacagattttggatgccagtttcaatacagaagtgaatgagaagaaccagaaaattcgtaccgtcaaaatcatcactttgaaatccaatctagtttccaacttccgtaaagagtttgagttatacaaggtacgggaaatcaatgactaccaccacgcgcatgatgcctatttaaatgcagtagttgctaaggctatccttaagaaatatcctaaactagaacctgaattcgtctatggtgactatcaaaagtacgatcttaagagatacatctcaagattcaaaccctctaaagaaattgaaaaagcaactgagaagtatttcttttactcaaacttgttgaatttcttcaaagaagaggtgcattacgcagacggaataatcgtaaaaagagagaatatcgaatactccaaggacactggagaaatcgcttggaataaggaaaaagatttcgcaacaatcaaaaaagtactttcctatccacaggtgaatattgttaagaaaacagaaattcagacacatggtctagatagaggtaaacctaaaggcttgttcaattctaatccatctcctaaaccgtcagaagatagtaaagaaaatcttgttccaattaaacaagggcttgatccacggaaatacggtggttacgctggtatttctaactcgtacgcggtcttagttaaagctattgttgaaaaaggagcgaaaaaacaacaaaagacaattcttgagtttcaaggtatctctattttagataaaataaactttgaaaataacaaagaaaactatcttcttaaaaaaagatacatagagattctatcaactattactttacctaaatatagtttgtttgagtttcctgatggtacaagaagaagactggcaagtattctatcgacaaacaataaacgaggagaaattcataaaggaaatgaattagtacttcctggcaaatatactacacttttgtatcatgctaagaatattaataaaaaacttgaaccagagcacttagagtatgttgagaaacatcgaaatgattttgctaaacttttagagtgtgtacttaattttaacgataagtatgtaggcgcattaaaaaatggagaaagaatcagacaagcatttactgattgggaaacagttgatatcgaaaagttgtgtttcagtttcattggtccagaaaatagtaaaaatgccggattattcgagttgacctcacaaggaagtgcctctgattttgagtttttaggagtaaaaattccacgatacagagactatgcaccgtcatcgcttctcaaggccaccctcatccaccaatccatcactggtctttacgaaactcggattgacttgagcaaactaggagaagactaa

SEQ ID NO: 383 - DNA, 3387 bp, Streptococcus vestibularis ATCC 49124
atgagcgacttagttttaggacttgatatcggtataggttctgttggtgtaggtatccttaataaagtgacgggagaaattatccataagaattcacgcattttcccagcagcccaagcggaaaataatgtagaacgtagaacaaatcgtcaaggaagacgattgacacgacgtaaaaaacatcgtagagttcgtttaaatcatctatttgaggaaagtggattaatcaccgattttacgaaggtttcaatcaatcttaacccatatcaattacgggttaagggcttgatcgatgaattgtctaatgaagaattgtttatcgctcttaaaaatatggtgaaacaccgtgggattagttatctcgatgatgccagtgatgacggaaattcatcagtaggagactatgcacaaattgttaaggaaaatagtaaacaattagaaactaagacaccgggacagattcagttggaacgctaccaaaaatatggtcaattacgtggtgattttactgttgaggaagatggaaaaaaacatcgcttaattaatgtctttcctacatcagcttatcgttcagaagccttaaggatactgcaaacccaaaaagaatttaatccacagattacagatgaatttattaatcgttatctcgaaattttaactggaaaacggaaatattatcacggaccaggtaatgaaaagtctcggactgattatggaaggtatactactaagaaagattctgaaaatgagtacataactttagacaatatttttggtatcctaatcgggaaatgtacattttatccagaagagtatagagcagcaaaagcatcctacacggctcaagaattcaatttgctaaatgatttgaacaatctaacagttcctactgaaaccaagaagttgagcgaagaacagaagaatcaaatcattaattatgtcaaaaatgaaaaggcaatggggccagcgaaactctttaaatatatcgctaaactactttcttgcgatgttgcggatatcaagggataccgtatcgacaaatcagataaggctgagattcatactttcgaagcctatcgaaagatgaagacgcttgaaaccattgattttgagaaaatgtcaagagaccaacttgataagttagcctatgtcttgacattaaacactgagagggaaggtattcaagaagccttagatcatgagtttgctgatggtaactttagccaggagcaaattgacgaattggttcaattccgcaaagcaaatagttccatttttggcaaaggatggcataatttttctgtcaaactgatgatggagttaatcccagaattgtatgcgacgtcagaagagcaaatgactatcctgacacgacttgggaaacaaaaaacaacttcgtcttcaaataaaacaaaatatatagatgaaaaactattaactgaagaaatctataatcctgttgttgctaagtctgttcgccaagctataaaaatagtaaatgcagcaatcaaagagtatggagactttgacaatattgtcatcgaaatggctcgtgaaacaaatgaagatgatgaaaagaaagctattcaaaagattcaaaaagcaaacaaagatgaaaaagatgcagcaatgcttaaggctgccaaccaatataatggaagggctgaattaccacatagcgttttccacggtcataagcaattagcgactaaaattcgcctttggcatcagcaaggagaacgttgcctttatactggtaaaacaatttcgatccatgatttgataaataatcctaatcaatttgaaatagatcatattttacctctttctatcaccttcgatgacagtcttgctaataaggttttggtttatgcaactgctaaccaagaaaaaggacaacgaacaccttatcaggctttagatagcatggatgatgcatggtctttccgtgaattaaaagcttttgtacgtgagtcaaaatcactttcaaacaagaaaaaagaataccttcttacagaagaggacatttcaagatttgatgttcgcaagaaatttatcgaacgaaatcttgtagatacaagatacgcttcaagagttgtcctcaatgcccttcaagaacactttagagctcacaagactgatacaaaagtttccgtggttcgtggtcaattcacatctcaattgagacgccattggggaattgagaagactcgtgatacttatcatcaccatgccgtagatgcactgattattgctgcttcaagtcagttgaatttgtggaaaaaacaaaagaatacccttgtaaattattcagaaaaccaactacttgatattgaaactggtgaacttattagtgatgatgagtacaaggaatctgtgttcaaagccccttaccaacattttgttgatacattgaagagtaaagaatttgaagacagtatcttattctcatatcaagtggattctaagtttaatcgtaaaatatcagatgccaccatttatgcaacaagacaggctaaagtaggaaaagataagaaggatgaaacttatgtcttagggaaaatcaaagatatctatagccagactggctatgatgcctttataaagatttatcagaaggataagtcaaaattcctcatgtatcgtcacgacccacaaacctttgagaaagttatcgagccaattttagagaactatcctaataaggaaatgaatgaaaaagggaaagaagtaccatgtaatcctttcctaaaatataaagaagaacatggcgactatattcgtaaatatagtaaaaaaggcaatggtcctgaaatcaagagtcttaaatactatgatagtaagttaggtaatcatattgatatcactcccaaagatagtaacaataaagttgtcttgcagtcagtttctccatggagagcggatgtctatttcaataagactactggaaaatacgaaatccttggattaaaatatgctgatctacaatttgagaaagggacaggaacatataagatttctcaggaaaaatacaatgtcattaagaagaaagagggtgtagattctgattcagaattcaagtttacactttataaaaacgatttgttgcttatcaaagatacggaaacaaaagaacagcagctattccgtttcttatctcgtactaaacctaatgttaaacactatgtagaattaaaaccttatgataaacagaaatttgaaggaaatgaatcgttaataaatgtactaggagctgtagctaaaggtggtcaatgtcaaaagggaataaacaaacccaatatttctatttacaaagtaagaacggatgttctaggaaatcagcatatcatcaaaaatgagggtgataagcctaagctagatttttaa

SEQ ID NO: 384 - DNA, 4101 bp, Lactobacillus composti DSM 18527
atgacaaaagactatagtttaggcttagatattgggacaggcagtgtgggtttcgctgccttagacaccaattatcgcttgttgcgggctaagggcaataatgttattggggtgcgcttgtttacgccagcggagactgctgaagaacggcggggctttcggacagcacggcgacgtttaagtcggcggcgctggcgcctgggggcattgaacgggatattcgccccagaattagctaaggtggatcctaactttttgcatcggttaaagtacgcttgggtgcatccagcagatcaacaaaacaaaggtaaatattccgccgcgcctttgtttaacgatgctgcgctggaccgccaatttcatgatgactatcccaccatttatcatttgcggctaaagttaatgacggatacttcacaacatgatttaagagaagtttatttggctattcatcatattatcaagttccgggggaactttctcagaggggaagggccaattaatgccagcgaagcctttgacattaatacttttattgaccaaatgaccgctttttatgatcaagccttcccagatttcaagattgtggatcaagtggaccaacaaataatctttaaagggttaacggacatgacgttgtcccctgcagatcgggccaataaggcccttatggggtttaataacgctgcccagcaacctaataagagaatatttaaggctattttaagcggccttgtggggaatcaagtggacttaatggctatttttcagttagatgggattcccaaagaagaccaaaaagaatttaaattcaaatttgttgacaacgatatcgaagagaagctggcggctctcggggataatccggctttatctgatgaacaaaacgaatttttgacaacgctttatgccgccttcagtggcttgactttaaagggcttattgggggatgctacctcgatttcagctgctatggtggctcgctacgctagccatcgcaccgactggacctatatcaaagaccacgttttaacaccgcagaataatcgggaattgcgtctggcttatgccgacttgatgactgacaacgaagacgtgcgattgaaagcgggcaagaagttcgctaaagccattgaggcagctgatatcccagcggctaaaaagtcggaattttcactgaaaatcgacaataatgaattcttaccccgccaaagaaccaaagcaaatggtacgattccccaccaactccatttaaacgagttgcagcaaattattgaaaatcaggggcaatattatcccttcttaaaagccacttttgagcaggatggccatactttgaataaaattgaaggtttggtgaagtttcgcgtcccttattacgtggggcccttggtgcccaagcacaaggtggcggggaataacgctaatcattggatggttcctaaagaacctggcgccatcactccttggaactacacggaaaaagttgatcgggacaaatctgggaatgaatttattcggcgcatgactggtaccgatacttatctgttaggagaacccaccttacctaagaattctctggtctaccaagaatttaatgtgttacaagaattgaataatcttcgcatcgaaaagcgccgcttagatattgctgtgaagcaagatatttttgaacatgtttttaaaaccaataaaacagttacagtcaaacgcattgaagaatatttgaccacagaatttggcagccccgtaacattgagtggctttgctaatgtgaacgaacgcaaattaaacagctcgctgagcacctaccattattttgtggggatatttggcgctgagtttgtagatgaccctaaaaacttaacactcttggaacaaattgtggaattacaaacggtttttgaggaccgtaaagcgttacaacgtcaattgaaattgcgaccagagttgtcagaaaagcaggtcaaacaactggcccggacgcattacactggttggggtcgactatcccaaaaattattgaccagtaaaatcgttcacgtggctttagagggtgagcgggaaccagggcaatattcaattttagaaacattatatggcacacaaatgaactttatggaaattgtgaatgatatgaaggaccgatatggggtcaagtcttggttggaccaggaaaatagcggttccgaaaataatctgagtttgaaacaacggattttagatatgcctgggccgaagaatattaaacggggtatcaatcaagcctttcatattatcgatgaaatcacccgggccgtggggaacgcccccagccggatttatatcgagtttgcccgggaaagccaacagtctaatttaaccaatgcccgggtcaaccgactgaaacaactttatagcaatcaggctctgaaaaaagaatttgccaagctggctagtgaaataaaagacctcaccaaagaacaattaaaggacgatcggttgtatctatattatctgcagcaaggcaaagatatgtacactgagactgatatcgatataactaaaatttccagtaactatcaaattgatcacattattccgcaagcctatacgaaaaataatagtttggataatcgggtactggtcaattcagagatgaacgcccgtaaatcagattcaccgacatttttgcccagccttattcaagagcgcaaagcttggtggcggcagttaagggacaccgggttgatgagtaccattaagtataataatctaacccggacatccgatgatttttccgctgaccagaaagaacgtttcattgctcggtctttggtagaaactcgacaagtgatcaaaaacgttgcaacgttgattaaagagtattacgacgattctcaagttgaagctctaccttctgaaatcactgctgaaatgcggcgctatttgaatgttcgtaagaatcgagatatcaatgattatcaccatgcccatgatgccttattattcgccacagccggtgaatttagccgtaaggtgggtattatggagaaggggcgtgttagcgacggggctgggaatatctacaatcgatataccaaagatattatccaacgggcccgggcaaaagccggtcaggataagaaagttcgaccgtttacttttattgtggggtcaatggctaatcctgacacgaagtttcaaaccaatcaaaccaccggtgaaattgtctggacgccggaggatgtggcttatttacggaaagtcatcgattataaaaagatgctggtgactaaaatgaccttggaccaaaccgggacactctataatgagacccgctatggtagtggggataagcacgtggcagttgcgttaagtaaagataaagcagctgacttatatggtggttttggttctctgaagccagcttacgctgctttggtatattccaagaagaaattccgcctagtaaatgtactgcgtctctggttaccggaaattaaaaagaatgccagtgttcttgaaagaaaggtgcaatctgtgcttggagatgacaacgcgaaagtcattcgcgcccacgtaccttgtggacaattattgattaaagatggtgcattagttacggtctcctcagctactgagttgcataatttccgacaactatggctaccaaaggcagattatcaagatatttcgattctgcttggggcgccggataaagtaacagctgagaatcgactgcaggctgaatcgcactttgatgatgtggatcagcggtttgaaagtttgttgaaggatgttattgatcaagcacggcaatactatccgttgaagactcatcaaactagcttagaaaaactgattggtaaaatcggtaaatttgatgagttgaaatttgctcaaaaacaacaagtatttagtaggttattaagcgcgttacatgccaatgcaactaatagtgacttgaaacagattggtttgtcaactgcctggggccggcttatttatcctaaaggtgtttcactgactgatgaagataaattaattaacagttcatttactggattgtttaatgacgttatgagtatcaaagaatttcacgatttttcaatcaactaa

SEQ ID NO: 385 - DNA, 4101 bp, Lactobacillus concavus DSM 17758
atggataaaaaatataatattggactagatatcggaacaagttccattggattcgtggcgaccgatgaagacaaccatgtgattcgtgcgaaaggcaagaatgtgattggcgttcgcttatttgatgaaggtcaatctgctgcggaacgacgcggctttagaacaactcgacgccgcttgaaccgacgcaaatggcgcttgaatttgttgcgcgaaatattcgagccacacatttatcccattgacgcttcttttttcatgcggcaaaagtactcaaacttatctaaacaagatcctaatcagaagattgagtttaaggatattttattctcggataagtcggatgccgagttttatcgccaatacccgaccatttatcatctgcgtcaggctttgatgactgagaaacgacaatttgatttgcgtgagatttatttggcgattcatcatattgttaaatatcgtgggcatttcttggatgaaacgccgacagataaattctcgttcgatcaattagatctgactcaagagtttgaacgcctgaatgtgttgttttcggaacaaaatccggaagaaccatttgaaattgtcgtcaatcaaaatcaatcgattgaggacatcctttctaatcaaagtatgactgcgagtgatcgacgcaagcaagcgctggttgttttctatcaacaatcagagaacaaagagaacgagaagcagtacaaagcaatcgccacagaaattctaaacctcttgttgggtaacaaagccaagttaaatgttatcttggcacaagaggtcgataaagaagcagccaaggattggtcattgtcgttgtcttccgagacgtttgatgatgatcttgaaaaggcttcgagtggtctaaacgacagtcaactggaaatggtcggcatctttgagcgcatttattcatcgctaattttgaagtcgatcataggggatcacaacagtttatctgctgccatggtcgataaatttaagacccatgcacagcatcgcgatttattaaaggatgtcatcaaaaacagcgatgcaactaaaggcgagcaattgcagtttgcctacgatcactatttacaacgtcattctgcagatggtaaagcttacggaaaagatgatttttacaaggaggttaagaaaaatcttgatgactccgatgcggcgcaacaaattcagcaattaattgacaccgaccagttcatgccaaagcagcgtaccaaggcaaacggtgcgattcctcaccaagtgcagcagaaagagctggacttgattatcgagaatcagtgccaatactatccttggctagcagaggagaaccccaactcagaacgtcataacgttgccaagtacaaactggacgaattggtctcgtttagagtgccctactacgttggacctctaatttcgccggctgacgatgagacagatccacaagcaattcagaatactaagtttgcgtggatgattcgcaaagatgctcagggtcgaattacgccttggaatttcgatgataaggtcgatcgcgaaaagagtgccgacaagttcattaaaagaatgacaactacagatacttacttgattggcgaagacgtgttgccagatcaaagtttgatttaccaacgctataaagttctgaatgaactaaataacgttcgtattaatggccggccaatagaagttcagatcaagcaaaacatttacacggatttgtttaagaagtttaagtcagtctcggttaaaaagctacgcagttatttggaagaaatgagctattaccctggttcttttaaaattagtggtctcacgaatccgggtaaatttgataatgggttgacatcatatcttgattataaaaatattttaggcgatagcgtcgatgccaatgataaacgtgctgacattgagcaaatgattgaatggtcaacgatttttgaagacaacaagatttttgcacaaaaattggaaagtatgacttggttaaccgcagaacagcgtaaagcaatttcccgcaagcgatacactggttgggggagattatcgaacaaattattgacccagctgaagaatcaggataatcgctcgatcatggacttactctgggaaacagaagagaacttcatgaagattcagtccgccccagatttttcaaagatgattgaagcacataaccagcaattcattaaaaatgaagctaacattcaacaagtcatctcagatttatatacttcgccacagaataaaaaagccattcgccagattttattagtcgttgacgatattcaaaaagcggtgggacacgcgcccgagcatattgcaatcgagtttgcaaagggtgaggataagaatcctagacgtacgatcagtcgtgaaatgaaaatccaagatgtttatcaacaaatctccgatgatattctcgtctcgccagaggtcagagcgcaacttaatgagaaaattgaaaatcgtcatgggcgtctgagtgatcgacttttcctgtatttcatgcagggtgggcgagatatgtatactggcaagccaatcaatattaataatatttcacattatgatattgaccacatcttgcctcaggcatttatcaaggacgactcgctggataatcgtgtacttgtcagtgacaagcttaatcgagagaaatctgacactgtaccacgtgatttatttggtcgcgaaatgatgtcgacttgggaaaagatggctgatcgtggactgatcacgaaacgtaagttggccaatctgaaaacaattccaggcagtattgacgcccacaaggcacaaggcttcatcaaccgtcaacttgttgaaacgcgtcaggtgatcaaactcgctgttggaattatgattgatcaatatcctgaaactcagattgtttcagttaaggctaatttgacccacgaaatgcgcgaaatgtttgatttggttaaaaatcgtgatgttaatgactaccatcatgcttttgatgcgtatttaaccgcttttgtaggtaattatttgctgcaacgttatcctaagcttgagccgtattttgtttacgacaagttcaagaaattaaaagatcaaaacatatccatgcgcgattttaatttgttgtatgacctaaagaagaatgaagacgtttatgatcagcgtactggtcactctgcacataaaatctgggaccagcacggaagcatcgactacattcgccacttattcgcatacaagaaaatactcgtgagccatgaagtgcatcagaatggtggcgcgctctacaatatgacggtttacggcaaagccgatgatgccaaacggaaattgattccaattaaagctgataaaccaacggagctctatggtggctacaccagccggaaacttgcttacatggcaatcgtaaagaccaagaagggaaagaaagaacagtatcaagttactggggttccggtttctgctttgacaacattacgccaatttaaggaagattcaccagaacagaaacaagcgctcgaagaaatcgttcgacgtaattttgatgaaaaaactgaagttgaaataattgtccctaaggtattgtttaatcagttgattgttgacgagaagtgcaggtttatggtcgggagcgatacgtatcgatataatgcgcagcaactagttttatcagctgatgatctagagattattaatgcctcacataaagacattcaaacgatagattcaagtgattactctcaacagcttgatcaagtttatcaaaatattttaacaatagtggacaagcattttccgatgtatgatattaataagtttcgaactaaattacatgatatttatgaacaatatattgaacttccaaatgaggatgtgtgggagaacaataaactaacaactttgggtaaacacactataatcattcgaattcttcagggattacatgctaatgcaaccgtagtagatttaaaacagttgggaattaaaactccatttggattcatgcaacaagctaggggaatagtggtttcacctgatgcccagttaatctatcaatctccgacgggtctttatgagcggcgtgttcgtttaggcgatttataa

SEQ ID NO: 386 - DNA, 3960 bp, Weissella halotolerans DSM 20190
atggcatatagtgtaggtcttgacattggtgtgggttcagttggctttgctgggattgataatcaatacaacctagttagaacgaagggtaaaaatgtgattggggtgcgcctatttgatgaggcagactcggcagcagaacgaagggggcataggactaatcggcggcgtttgcagcgccgacgttggcgactacgcttgttagatgacatctttgcaaaacccttacaagcggttgatcctaatttcttagctcgtttgaaatatagctatgtcaataaaaaggaccaggggcaacaggaccattattatggtggttacgtatttgggagtaccgcagcggatcaagcatatcatcaagcgtatccaactatttatcacttgagaaagagattaatggaagatgaccaaaaacatgatttgcgggaggtatatctggcaatccatcatattgtgaaataccggggtaactttttgaatcctcaatcctccttggatattgatcaacagtttgatgttactgattttgctcaggcattagctcgttttgcggatcatcaggcattaagctgggccttggaagctccaatacgtttcttggaggctgaattagcgactggcttgagtaatagtgcccgggtagatgccgccatagaagcctttagctttgatactaaagtggatcgagctgccatcaaggaaatgctgaagggacttagtggtaaccaaattgactttactaaactctttgtgaatgttgattcagctgattgggatcaggaagaacgaaagcaatggaaaatgaaactttctgaagaagactttgatgagcaggccttgccaatcttagaacgacttagccaggatgaaacagaattctttttggccattaaacgagcatatgatgggattgctttgatgcgttttttgggagatgagcaatcactgtcatcagctatgattaaagcctatgaagatcatcgacgggatttaacttttttaaaaacacaagtgcgaacaccgcagaatcgacaagctttatctgaaggctatacaaactacttaagtgtagacgataaaaaacataaacggggggctaaggagctagctcaattgatcgaagctagcgatgccagtgagcaagacaaagcaacgatgttggatcgcattgcgaatgaccagtttgcccctaagcaaaggactaaagctaatggattgattccttatcagttgcatttggctgaactaaagaaaattctagctaagcagggtcagtattatccatttttactggatacctttgctaaacagggccagtccgtaaataagatcgaggaattagttcagtttcgagttccatattatgtgggtccgatggtaccgaagtctgaaacagccgggaatgccgaaaatcattgggtagaaaaaaatgatggccaaacgaaagtgtcggtgacaccatggaactttgatcaagtttttaatcgtgatcgggcagctaaaagttttattgaccgattaacgggcaccgatacctatttaattggtgaaccaactcttccccggcattcactgacgtatgaaacatttacggttttgaatgagctgaataatattcggattgatggtaaacggttaccggtggaaacgaaacaagccattgtggaggaccttttcaaaaaatatcgattagtcactaagaaacgccttcaagattattttgcaagctttggaaaacgtgaggtcgagttaacgggtttggcagatgaaagccgctttactagtagtttgaccagttatcatgacttgcagggcctgctagggactgattttataactaatcctcaaaatcattcactgttggaaaagatagttgaaattcagacagtctttgaagatagtgacattgcagagcgtgaattaggcaagttaggcttagagcaaaaacttattccccgcctggctaaaaagcactataccggctggggtaatttgtcacgtaagttattagacacttcctttattcacgatccagaacggcctgaagagccagtttcaatcatggacttactctatacaacgaataaaaatttcatggaaatcctacatgattcagaatatggggtagaggaatggctaaaaagtcaaaatatgattgatgaccaaaaagatattcaaatgcgaattgatgaattaaccacctcaccagctaataaacggggaattaagcaagcctttaatgtcttggacgatattactcaagcgatgggggaggaaccagcttacgtctatctggaatttgcccgcgaaaaacaggcatcaagacgaacggtttcacgtaagaagcgactggagaccctatataaaaatgcagctttgaagactgaattcaaggctattaaagaagcactggccgaagaatcagatgaccgaatgcaagatgaccggttatacctgtattatgcgcagttgggtcgtgacatgtataccggtcaaagtatcagtattgatcagctgtcaagtcactatgatattgatcatatcgtgccccgtgctttcatcaaggatgattccttggaaaacaaggtcttagttaatcgaactgataatgcacggaagacagattcagccacctttacggccgatgttaaggctaaggcttttccgctttggcaacagttaaaaaaattaggactcatttcggctaaaaaatttaggcttctaacacgaactggcgattttacagagatggaacgcgagcggtttattgctcgacagttagttgaaacccgccaaattattaaaaatgtggcggctttgatagaaggccattttagtcaaacccaggcggtcgccattcgggctgaagtgactggtgaactgcgacagttgacgcaaattaagaaggaccgggatattaatgattatcaccatgcccaggatgctctgctagtagcgacagcaggaacttacctgcaccgtcattttcctaaacgagatgcccggtttatttataatgagtttgattattacacccagcactggctcaagaatcagggagagaaccgccgccggcatccttacagctttgtagtcggtacaatgagcaaaggtaatgaagattggacaccagataatttaaattatctgcgaaaagttatgcagtacaagaccatgctaatgactcggaaaccagtaggaccagaaggcgccctatataaggagactttaatcgcggctgaccctaagaaacgcttggtaggggccagtaaggaacggcaggatccaactatttatggtggctacactaaggaaagttcggcctatatgtctttagttcgggctggtgggaaaaatcagttggtaaagattccggtacggattgctaatgaaattcatagtggccaacgaaagttagacgactatgtgcaagcaaaggtaaaaaagtttgagcgaattctgttacccaagatttcattagggcaactcgtagaagatgagggtcaacgtttttatcttgcaaccaatgaaatgaaacacaatgctaagcagctctggctggatcaaaaggtggtgacaacttataaacgtttaactgctgaaagtccagttgaggattttttgactgtttttgatgctttgactagttcggctactatccaccattttaagttttatcagcgggatcttgaattacttagggacaatcgtgctggctttcaagacttagctaaggcaacgcaattaaaggtgttgaaggatgtgttgtatgagcttcacgataatgctggttggcgagatccaattaagcagtactttaaggaaataggattaaaagtacgcatgtggacaaaacttcagaaggaaggtggcattaaattaacagatcaagcagaacttatttatcaatcaccaagtggtttgtttgaaaagcgacgccgcgttcaggatttgctgtaa

SEQ ID NO: 387 - DNA, 4113 bp, Weissella kandleri DSM 20593
atggaaaaaaataaagagtacgtaattggattagatattgggactggttcagtggggtggtcagcgatatccacggataattatcaattgattcggcaaaagggtaagaatttaattggggtgcgtttatttaatagtgctgaaacggctgaagaacgacgtgggtatcggactaccagacgacgtctttcacggcggcgttggagaatgagtttactgaatgatatttttagacctgagttaaatgaaattgatgaaaattttttggcacgtttaaaatattcatgggttagtccactagatcagaaaaatccgcaattaaatgaacaaggaacgaatgctagtttatatggtgatatagaagctgatcaagcctttcatcgagcttatcctactatttatcatttgcgtaaaacattgatggaagataatcaaaaacatgatttacgcgaagtttatctagcaattcatcatattgtgaaataccgaggccattttttaacaccagattttgatgctaatagtcagactattgatatcaaaggattatttaagcaattaggtgatgtgagtggttctattgagttacaagctgatcaaacatcaacggtaatagcggcttttcagtcgattttgttagacttcactaagacccctactgagagtggacgattagcaggacaactttttagtgatcaaaataaggataaacaggctaagaagcaagttgaagagttgtttaagttattaagaggtggcaagggttcactggcagacatgtttttattaaccgatttggataaggtagtaaaaaatcaattaaaatttgcttttgatgatgcagttgatgaaaatctaaatcttatttccaatctgattaatgaagaacaatatgaactgttattaaacattcagaaattacgtgggactattattttaaagcaaattttaggtgatgatgagacggtgagcgacgctaaagtgcggagttatgaagaacatgctcatcagcttaaggagctaaaggcacaagtactgacgaaagataataaagagaaatttgaagaagcttatcaactaattcaaaaaggggatgcatcacgtattgatggtcttaagaaattgaagacgataattaatcaagagcacgaagccttacgattagataagtatgaggctgataaacttttgaaattaattgagcttgaccaattattaccagtgcaacgttctaagcgaaatggtgaaattcctcatcaattacatgaatttgaattaaagaaaataattgaaaagcaaggccgatattatccttttttgcgagaaacgtttgaacgcgatggtcaggaatttaataagataggacagctggttaattttaggattccttattacgttgggcccttggttgatccaaggttggctggtattcaatcgggtgatcagacgaatcattggatgacgcaaaagaaagcgggaaaaattacgccgtggaattatacggaattgattgatattgataaatctgcggctgaatttattaaacgcatgacggggactgacacgtatcttgtaggtgagccatcattacacaaggccagtttaatttatcaagactataacgttttgcaggaacttaataatttacgttatgacggtaagcccttgccggttgatgctaagcaggaaatttattcaaatttgcaagtgtcattaaagaatgcaacgaagaataaaattaatagtttccttatctctgaggggtatttgcaggatggagaagaattaactggttttgcaggaaaagaattgaagaataaattaagctcgttccattattttaaaaatattttcggccctgaacggatgaacactctggggacagataatttagagaaaattactgaattacagaccgtgtttgaagatcgccatatgttaaaacgccaacttcaaaaattaggatttttagatgatgatgaatgtgaaaagttagctggtaagcatttcactggttgggggaatttatcaaagaaattgttaaatacgccggccattatagatccagagattaatgaaaataaaattagtttaattgatgctttatataaagggcaacggaatcttagcttttatgttaataatatggatgataagtatcaatttcgtgattggattgaaagtgaaaatcaaagtcaacaggttgaaattagtttagatgaaaaaattaaaaatttagcaggatcaccagctattaaacgtgggattacacaaagtatggcagtgattcaagacattatcagagctaataatggaatttcaccaaaaagaatttatttggagtttgcgcgtgaatcgcagaattcgtatcaacctaattcacggataaaacagattgagaaaatttatgatcagaataagaaagagttaatgaaggtatatccagacgtttttaaagatgtacaaggtgtattgaataacgttgatgagaataattctctatcagaaaaagcatttttatatttcatgcaattaggtaaggatatgtataccggggaagctttggattttgacaaattatatacttatgatattgatcatatcattccgcaagctatgactaaagataattcatgggataacaaggtattggtgacagcaattaaaaatcgtgaaaagtctaatcaagttttagataatgctatccaagctaagatgcataatttttggttgcagttaaagaaagtgaatttattgagccaacgtaaatacgatacattaatgaagaccaacttcagcaaaggagacgaaaagaaatttatcgcgcgttcgttagtggaaacacgtcagattattaagaatgttgcagaattaattaagagtgagtttgatcatgttgaggcaattccgattcgacaagagttaacaagcgatatgcgtcagttaatggattataaaaagaaccgattagtgaacgattatcatcatgcccatgacgctctgcttattgcgacggtaggagagtttatgcaaaaacgcggatttatgcaaggaatgaatccatctcaaaatgtttatcatgggtatacgcaatatgttaaaaagtggttgagcatggctaaaaaagcaaggtccgctgaaaaacctgaacgcatttttccattacaattcgtggttggatcaatgcggatggctgtacgtgatggtcaagttgataaggttactcatccagctaccggagagatatgttggacagctgataatgaagcatatttgagaaaagttttgggttataaaaacattttggtgacacgtaaggttaaaaatgctggcaagttatatcaaagagtcacggtgaagcctaaaggtagtggtgaagcaccagttaatcatcaaaaatcagatattaatatttatggtggggtcactagtgaacaggcagcagagttggttttgattcggataaaagcaaagaataatgctaaaaatatggtgattaaaattccaacagctattgctaatcaggttgcaaataagaccactacgtatgatgcgtacgttcgaagcttaaatattccaaattatgctggaattattttggatcagattcctttaggtcaactggtttttgatgaaagaacaagtttttatctggcttctgcagagattaagcataatgctcgtcaactatgggtgaatcaacacattaataacgttttaactaaaaagaatatcaatgacgaggaaagagataatattttaaatttattgaccaatgagaagaatttagagcgatttaaactattagaacctgatttgaaacgggtgaaggcagctaaacaacagtgggcgagctgtgacgatcaagagcagatgcaaatattgaggattattatcaataaaatgcatgatgatgctagtccgcagattccaggaaaaatagacccatttaagaattacctagataagcaagggaaggggtggcgtgatttaagaactaaaaaaggaatgaaacttagtgataatgcagagtttgtttaccagtcaccaactggtttataccatcggaaaatatcaattaacgagttattaaaacaaaagcaattagaatag

SEQ ID NO: 388 - DNA, 4200 bp, Olsenella uli
atgaatcttcgcaatactacagacgagtacaacatcggtctggacatgggcaccaactccgttggatgggcagttacagataaagctggggccatcgcgcacttcaagggcaagcccactctgggtagcaggcttttcgacgcagcgcaaactgctgcaggggcgcgtatacaccgcagccaacggcgtcgttatgttcgcaggcgttggcggctcgaccttctacagagtctcttccaagatgaggtcagcaaggttgactcagagttcttttgcaggcttagacaatcgcgcctgtatgtgggagatagggaaaagggacatgcggattacacatggcccatcttcaatgactcagacttcaacgaagtggattattacaagcgctttcctaccatttaccacctacgcaaatggctgatggaaacggacgagaaagccgacattcgtctcatctatcttgctactcataacatcgtgaagcataggggcaacttcctgcgtgagaacaacaagagtctgagttctcgtgatgcaaatcctgctcaggcggtgaagagtctgcgactggctttgaacgattggtgttcggagcgtgactatgagtgcgcttggaaaggcgaggaagatgatggtgctatcgacgaggccattctcaatgtgctggctgatggcgagaaagggcgcagcgaccaggcaaaggagattgccaagctaactggtgtcgattgtggggacgcaaagcagagcaagcagtgtaacgaggcaatcgctaaggcaatcgtcggactcaaggtggagatgaagaacatcttcggtgagtttcctgctgagaagacatcatacatttatttgtcgtctgacgaagatgtcgaggccgttcgtgaatcctgtcctgatgatagtggagaattgttccaggcgctttgcaagttgtactcagcctacatcttgcaggagctcctttcttatgcagatccatcaggccagaccatctcggccaacatggttgccaagtacaagcagtacggaagagacttgagactgctcaaggagcttacacgtacatatgcgccacagaaatacgacttatttttccgtggtgagacatatgcggggtcaagcgactacgtcgtagacgaggcgcgggggtatacccgatataaccttggtaccacaaaggcgaactatgatgacttccagaagtcagtcaaggaactcttcaagggaacggatgcgctgcaggatgagcgttaccaagagatgatggtagcctttggcgagcagaagtttcttcgcaggctcaagacgagcgataacgggagcatctactaccagcttcatctagaggagttgcataccatcctcgaaaaccaggggaaacactatcccttcctcctgtctgaagaagacaagattgagtcgctcgtgtccttcaggattccctattatgtggggccgcttaccaggaaaaatgccgcgattggccatgacggtaaagagcgctttgcatggtcatcacgcaaggatggtatggagcatgctgtcatcaccccatggaactgggaagagatcatcgatcgcgataagagtgccgaagacttcataatgcgcatgacgggtgactgcacctacctccagggggagcccgtcctccccaagtgctctctgctctatgaggaattctgtgctctcaacgaatttaacggtgcgcattggacggttgatggggacgatgagcgtcgttttgacgccgcccaacgcgagcgcatcatgtgcgacttgttcagaagaactcgttccgtcacatacaataaggtctccgattggttggagcgcaaatacaattttacaggtgctcgtgtgcgcggaggacagggagagcatgggtttgagtcaaagctcggctcgtatatcttcttctgtaaggacgtattcaaaactgacgggctggacgaggccgactatacgatgatcgagcagatcatcctttggagcacgctatttgaggatagggacattctcaagcggaagatcgaggaagcatacggtggtgataggctgacctccgagcagataaaggtcatctgcaagaaacgctttacgggctggggacggctatcgaagagactcctcacggacattaaggtcaatacggatactggtcgcaagtcgattatggatgtgctgcgtgaggggaatccgaacaatggccaacgttctcgcacgatggtctttatggaagtgctccgtgacgaggaccttggcttccagaaggctattgatggcctcaacagggattatttccgcgagcacaataatggccttatggatgtaaatgacctacctgggtctcctgcgattcggagaagtatcaaccaggctgtacgcattgtggatgagatcgcctctattgcgaggaaagagcccaccaacatcttcattgaggtgacacgtgaggaggatgatccacgcaagaaaggcaagcgcaccaagagacgctatgacgcaatcaagagcgccctcgaaaaatttaagaaagatgatccatcgctttggaaagaactgtgcgaaaaagcaccgggggatatggacgaacggctctcgttgtacttcatgcaacggggtaagtgcatgtactcagggcgtccaatcaagattgaggagctacatactggaaaatacgaggttgatcacatcattccacgctcgtacataaaggatgacagcttcgagaacaaggtgctcgtgtaccgcgaggagaaccagcataagacggacgcgttgcttatcgattcctctatcaggcagaagatgggcggatactggcgtatgctgcatgacgcaaagctggtgggcgacaagaagttcaggaatctcttccgcaaccatattgatgataaggccatgaaggggtttgtcgcgcggcagatcgtcgagaccagccagatggtcaagcttgttcagacactgtttgaggcgaggtatccaaacacgcggatcgtgccggtgaaggctggcatctcgcatgatttgcgtgaagcagctggtctagtcaaatgccgtgaggccaatgatttccaccatgcgcacgacgctttccttgcctgtcgtatcggcctcttcatccagaagcgtcatcccagcgtctatgacaatcccattgggcttgcgcgcatcatgcgcgactatgctcgtatgcaggcgcgggagtataagaagtctcactgtcttgcacatacgcagggctttatcgttaacagcttccttagctcgggttttgatgaggagacaggcgagatattcaaggacgattgggatgctaaggctgaggtcgaggggatccgtcgcgtgcttaactgtcgccagtgctttataagccgtatgcccgtggagggagatacacgatatggtggccgctattggggagagacaatatattctcctaagggcaagcataagcatgagatacctctgaagcaagggcttgacccaaatctgtatggtggctactccgacctgctttactcatactttcttatttatgaagcgagtgacgtctcgtcgggagaaagagtactcaggttcataggaatcccgacatccattgctgctcgaatggccaatcagaaaaggctggaagaatacgtttctcgtctagctctccaagagaatcttgaacatgttcgcatggttcgcaagataatgaaaaagcagctgattgaagtagataactgcaggctgttggtaactgctgcagatgcagtaaccaacgcaactgaactcgctttttcgctagatgagatgaagataataagtacctgtgccaagtgcatcaatggagcagatcctagcgctatcgataaaattggcaatgctcaagatagtttctttgacaacttgaagcggaggggctctgataggtgcgcccttttattttcccagttaaagctcgacaaactttctcaaaacttttatatgatctcttccgacgataaatctaaaatccttatcagcattctggacaggattagggctaagagtaattcggttgacttgagcttagttgggggagcaaagcatgctgcccagatgaagttcgacttcaatgcaaagttgaataatcctgctagcagctttgtcctcatcgaccagtccgtgacaggcatgtttgagaggcggactcgcattgggctttag
